United States Patent Application Publication US 2026/0284228 A1, published September 24, 2026 (application 19/480,313).

The application's sequence listing, which the Patent Office published only in electronic form, follows.

SEQUENCE LISTING (1527 sequences)

SEQ ID NO: 1 - DNA, 4107 bp, Streptococcus pyogenes
  source 1..4107: mol_type = genomic DNA
atggataagaaatactcaataggcttagatatcggcacaaatagcgtcggatgggcggtgatcactgatgaatataaggttccgtctaaaaagttcaaggttctgggaaatacagaccgccacagtatcaaaaaaaatcttataggggctcttttatttgacagtggagagacagcggaagcgactcgtctcaaacggacagctcgtagaaggtatacacgtcggaagaatcgtatttgttatctacaggagattttttcaaatgagatggcgaaagtagatgatagtttctttcatcgacttgaagagtcttttttggtggaagaagacaagaagcatgaacgtcatcctatttttggaaatatagtagatgaagttgcttatcatgagaaatatccaactatctatcatctgcgaaaaaaattggtagattctactgataaagcggatttgcgcttaatctatttggccttagcgcatatgattaagtttcgtggtcattttttgattgagggagatttaaatcctgataatagtgatgtggacaaactatttatccagttggtacaaacctacaatcaattatttgaagaaaaccctattaacgcaagtggagtagatgctaaagcgattctttctgcacgattgagtaaatcaagacgattagaaaatctcattgctcagctccccggtgagaagaaaaatggcttatttgggaatctcattgctttgtcattgggtttgacccctaattttaaatcaaattttgatttggcagaagatgctaaattacagctttcaaaagatacttacgatgatgatttagataatttattggcgcaaattggagatcaatatgctgatttgtttttggcagctaagaatttatcagatgctattttactttcagatatcctaagagtaaatactgaaataactaaggctcccctatcagcttcaatgattaaacgctacgatgaacatcatcaagacttgactcttttaaaagctttagttcgacaacaacttccagaaaagtataaagaaatcttttttgatcaatcaaaaaacggatatgcaggttatattgatgggggagctagccaagaagaattttataaatttatcaaaccaattttagaaaaaatggatggtactgaggaattattggtgaaactaaatcgtgaagatttgctgcgcaagcaacggacctttgacaacggctctattccccatcaaattcacttgggtgagctgcatgctattttgagaagacaagaagacttttatccatttttaaaagacaatcgtgagaagattgaaaaaatcttgacttttcgaattccttattatgttggtccattggcgcgtggcaatagtcgttttgcatggatgactcggaagtctgaagaaacaattaccccatggaattttgaagaagttgtcgataaaggtgcttcagctcaatcatttattgaacgcatgacaaactttgataaaaatcttccaaatgaaaaagtactaccaaaacatagtttgctttatgagtattttacggtttataacgaattgacaaaggtcaaatatgttactgaaggaatgcgaaaaccagcatttctttcaggtgaacagaagaaagccattgttgatttactcttcaaaacaaatcgaaaagtaaccgttaagcaattaaaagaagattatttcaaaaaaatagaatgttttgatagtgttgaaatttcaggagttgaagatagatttaatgcttcattaggtacctaccatgatttgctaaaaattattaaagataaagattttttggataatgaagaaaatgaagatatcttagaggatattgttttaacattgaccttatttgaagatagggagatgattgaggaaagacttaaaacatatgctcacctctttgatgataaggtgatgaaacagcttaaacgtcgccgttatactggttggggacgtttgtctcgaaaattgattaatggtattagggataagcaatctggcaaaacaatattagattttttgaaatcagatggttttgccaatcgcaattttatgcagctgatccatgatgatagtttgacatttaaagaagacattcaaaaagcacaagtgtctggacaaggcgatagtttacatgaacatattgcaaatttagctggtagccctgctattaaaaaaggtattttacagactgtaaaagttgttgatgaattggtcaaagtaatggggcggcataagccagaaaatatcgttattgaaatggcacgtgaaaatcagacaactcaaaagggccagaaaaattcgcgagagcgtatgaaacgaatcgaagaaggtatcaaagaattaggaagtcagattcttaaagagcatcctgttgaaaatactcaattgcaaaatgaaaagctctatctctattatctccaaaatggaagagacatgtatgtggaccaagaattagatattaatcgtttaagtgattatgatgtcgatcacattgttccacaaagtttccttaaagacgattcaatagacaataaggtcttaacgcgttctgataaaaatcgtggtaaatcggataacgttccaagtgaagaagtagtcaaaaagatgaaaaactattggagacaacttctaaacgccaagttaatcactcaacgtaagtttgataatttaacgaaagctgaacgtggaggtttgagtgaacttgataaagctggttttatcaaacgccaattggttgaaactcgccaaatcactaagcatgtggcacaaattttggatagtcgcatgaatactaaatacgatgaaaatgataaacttattcgagaggttaaagtgattaccttaaaatctaaattagtttctgacttccgaaaagatttccaattctataaagtacgtgagattaacaattaccatcatgcccatgatgcgtatctaaatgccgtcgttggaactgctttgattaagaaatatccaaaacttgaatcggagtttgtctatggtgattataaagtttatgatgttcgtaaaatgattgctaagtctgagcaagaaataggcaaagcaaccgcaaaatatttcttttactctaatatcatgaacttcttcaaaacagaaattacacttgcaaatggagagattcgcaaacgccctctaatcgaaactaatggggaaactggagaaattgtctgggataaagggcgagattttgccacagtgcgcaaagtattgtccatgccccaagtcaatattgtcaagaaaacagaagtacagacaggcggattctccaaggagtcaattttaccaaaaagaaattcggacaagcttattgctcgtaaaaaagactgggatccaaaaaaatatggtggttttgatagtccaacggtagcttattcagtcctagtggttgctaaggtggaaaaagggaaatcgaagaagttaaaatccgttaaagagttactagggatcacaattatggaaagaagttcctttgaaaaaaatccgattgactttttagaagctaaaggatataaggaagttaaaaaagacttaatcattaaactacctaaatatagtctttttgagttagaaaacggtcgtaaacggatgctggctagtgccggagaattacaaaaaggaaatgagctggctctgccaagcaaatatgtgaattttttatatttagctagtcattatgaaaagttgaagggtagtccagaagataacgaacaaaaacaattgtttgtggagcagcataagcattatttagatgagattattgagcaaatcagtgaattttctaagcgtgttattttagcagatgccaatttagataaagttcttagtgcatataacaaacatagagacaaaccaatacgtgaacaagcagaaaatattattcatttatttacgttgacgaatcttggagctcccgctgcttttaaatattttgatacaacaattgatcgtaaacgatatacgtctacaaaagaagttttagatgccactcttatccatcaatccatcactggtctttatgaaacacgcattgatttgagtcagctaggaggtgactga

SEQ ID NO: 2 - protein, 1368 aa, Streptococcus pyogenes [sequence omitted]

SEQ ID NO: 3 - protein, 1053 aa, Synthetic construct
MKRNYILGLDIGITSVGYGIIDYETRDVIDAGVRLFKEANVENNEGRRSKRGARRLKRRRRHRIQRVKKLLFDYNLLTDHSELSGINPYEARVKGLSQKLSEEEFSAALLHLAKRRGVHNVNEVEEDTGNELSTKEQISRNSKALEEKYVAELQLERLKKDGEVRGSINRFKTSDYVKEAKQLLKVQKAYHQLDQSFIDTYIDLLETRRTYYEGPGEGSPFGWKDIKEWYEMLMGHCTYFPEELRSVKYAYNADLYNALNDLNNLVITRDENEKLEYYEKFQIIENVFKQKKKPTLKQIAKEILVNEEDIKGYRVTSTGKPEFTNLKVYHDIKDITARKEIIENAELLDQIAKILTIYQSSEDIQEELTNLNSELTQEEIEQISNLKGYTGTHNLSLKAINLILDELWHTNDNQIAIFNRLKLVPKKVDLSQQKEIPTTLVDDFILSPVVKRSFIQSIKVINAIIKKYGLPNDIIIELAREKNSKDAQKMINEMQKRNRQTNERIEEIIRTTGKENAKYLIEKIKLHDMQEGKCLYSLEAIPLEDLLNNPFNYEVDHIIPRSVSFDNSFNNKVLVKQEENSKKGNRTPFQYLSSSDSKISYETFKKHILNLAKGKGRISKTKKEYLLEERDINRFSVQKDFINRNLVDTRYATRGLMNLLRSYFRVNNLDVKVKSINGGFTSFLRRKWKFKKERNKGYKHHAEDALIIANADFIFKEWKKLDKAKKVMENQMFEEKQAESMPEIETEQEYKEIFITPHQIKHIKDFKDYKYSHRVDKKPNRELINDTLYSTRKDDKGNTLIVNNLNGLYDKDNDKLKKLINKSPEKLLMYHHDPQTYQKLKLIMEQYGDEKNPLYKYYEETGNYLTKYSKKDNGPVIKKIKYYGNKLNAHLDITDDYPNSRNKVVKLSLKPYRFDVYLDNGVYKFVTVKNLDVIKKENYYEVNSKCYEEAKKLKKISNQAEFIASFYNNDLIKINGELYRVIGVNNDLLNRIEVNMIDITYREYLENMNDKRPPRIIKTIASKTQSIKKYSTDILGNLYEVKSKKHPQIIKKG

SEQ ID NO: 4 - protein, 1300 aa, unidentified
  source 1..1300: note = Franscisella novicida
MSIYQEFVNKYSLSKTLRFELIPQGKTLENIKARGLILDDEKRAKDYKKAKQIIDKYHQFFIEEILSSVCISEDLLQNYSDVYFKLKKSDDDNLQKDFKSAKDTIKKQISEYIKDSEKFKNLFNQNLIDAKKGQESDLILWLKQSKDNGIELFKANSDITDIDEALEIIKSFKGWTTYFKGFHENRKNVYSSNDIPTSIIYRIVDDNLPKFLENKAKYESLKDKAPEAINYEQIKKDLAEELTFDIDYKTSEVNQRVFSLDEVFEIANFNNYLNQSGITKFNTIIGGKFVNGENTKRKGINEYINLYSQQINDKTLKKYKMSVLFKQILSDTESKSFVIDKLEDDSDVVTTMQSFYEQIAAFKTVEEKSIKETLSLLFDDLKAQKLDLSKIYFKNDKSLTDLSQQVFDDYSVIGTAVLEYITQQIAPKNLDNPSKKEQELIAKKTEKAKYLSLETIKLALEEFNKHRDIDKQCRFEEILANFAAIPMIFDEIAQNKDNLAQISIKYQNQGKKDLLQASAEDDVKAIKDLLDQTNNLLHKLKIFHISQSEDKANILDKDEHFYLVFEECYFELANIVPLYNKIRNYITQKPYSDEKFKLNFENSTLANGWDKNKEPDNTAILFIKDDKYYLGVMNKKNNKIFDDKAIKENKGEGYKKIVYKLLPGANKMLPKVFFSAKSIKFYNPSEDILRIRNHSTHTKNGSPQKGYEKFEFNIEDCRKFIDFYKQSISKHPEWKDFGFRFSDTQRYNSIDEFYREVENQGYKLTFENISESYIDSVVNQGKLYLFQIYNKDFSAYSKGRPNLHTLYWKALFDERNLQDVVYKLNGEAELFYRKQSIPKKITHPAKEAIANKNKDNPKKESVFEYDLIKDKRFTEDKFFFHCPITINFKSSGANKFNDEINLLLKEKANDVHILSIDRGERHLAYYTLVDGKGNIIKQDTFNIIGNDRMKTNYHDKLAAIEKDRDSARKDWKKINNIKEMKEGYLSQVVHEIAKLVIEYNAIVVFEDLNFGFKRGRFKVEKQVYQKLEKMLIEKLNYLVFKDNEFDKTGGVLRAYQLTAPFETFKKMGKQTGIIYYVPAGFTSKICPVTGFVNQLYPKYESVSKSQEFFSKFDKICYNLDKGYFEFSFDYKNFGDKAAKGKWTIASFGSRLINFRNSDKNHNWDTREVYPTKELEKLLKDYSIEYGHGECIKAAICGESDKKFFAKLTSVLNTILQMRNSKTGTELDYLISPVADVNGNFFDSRQAPKNMPQDADANGAYHIGLKGLMLLGRIKNNQEGKKLNLVIKNEEYFEFVQNRNN

SEQ ID NO: 5 - protein, 986 aa, Synthetic construct
MEKRINKIRKKLSADNATKPVSRSGPMKTLLVRVMTDDLKKRLEKRRKKPEVMPQVISNNAANNLRMLLDDYTKMKEAILQVYWQEFKDDHVGLMCKFAQPASKKIDQNKLKPEMDEKGNLTTAGFACSQCGQPLFVYKLEQVSEKGKAYTNYFGRCNVAEHEKLILLAQLKPEKDSDEAVTYSLGKFGQRALDFYSIHVTKESTHPVKPLAQIAGNRYASGPVGKALSDACMGTIASFLSKYQDIIIEHQKVVKGNQKRLESLRELAGKENLEYPSVTLPPQPHTKEGVDAYNEVIARVRMWVNLNLWQKLKLSRDDAKPLLRLKGFPSFPVVERRENEVDWWNTINEVKKLIDAKRDMGRVFWSGVTAEKRNTILEGYNYLPNENDHKKREGSLENPKKPAKRQFGDLLLYLEKKYAGDWGKVFDEAWERIDKKIAGLTSHIEREEARNAEDAQSKAVLTDWLRAKASFVLERLKEMDEKEFYACEIQLQKWYGDLRGNPFAVEAENRVVDISGFSIGSDGHSIQYRNLLAWKYLENGKREFYLLMNYGKKGRIRFTDGTDIKKSGKWQGLLYGGGKAKVIDLTFDPDDEQLIILPLAFGTRQGREFIWNDLLSLETGLIKLANGRVIEKTIYNKKIGRDEPALFVALTFERREVVDPSNIKPVNLIGVDRGENIPAVIALTDPEGCPLPEFKDSSGGPTDILRIGEGYKEKQRAIQAAKEVEQRRAGGYSRKFASKSRNLADDMVRNSARDLFYHAVTHDAVLVFENLSRGFGRQGKRTFMTERQYTKMEDWLTAKLAYEGLTSKTYLSKTLAQYTSKTCSNCGFTITTADYDGMLVRLKKTSDGWATTLNNKELKAEGQITYYNRYKRQTVEKELSAELDRLSEESGNNDISKWTKGRRDEALFLLKKRFSHRPVQEQFVCLDCGHEVHADEQAALNIARSWLFLNSNSTEFKSYKSGKQPFVGAWQAFYKRRLKEVWKPNA

SEQ ID NO: 6 - protein, 1125 aa, Synthetic construct
MRKKLFKGYILHNKRLVYTGKAAIRSIKYPLVAPNKTALNNLSEKIIYDYEHLFGPLNVASYARNSNRYSLVDFWIDSLRAGVIWQSKSTSLIDLISKLEGSKSPSEKIFEQIDFELKNKLDKEQFKDIILLNTGIRSSSNVRSLRGRFLKCFKEEFRDTEEVIACVDKWSKDLIVEGKSILVSKQFLYWEEEFGIKIFPHFKDNHDLPKLTFFVEPSLEFSPHLPLANCLERLKKFDISRESLLGLDNNFSAFSNYFNELFNLLSRGEIKKIVTAVLAVSKSWENEPELEKRLHFLSEKAKLLGYPKLTSSWADYRMIIGGKIKSWHSNYTEQLIKVREDLKKHQIALDKLQEDLKKVVDSSLREQIEAQREALLPLLDTMLKEKDFSDDLELYRFILSDFKSLLNGSYQRYIQTEEERKEDRDVTKKYKDLYSNLRNIPRFFGESKKEQFNKFINKSLPTIDVGLKILEDIRNALETVSVRKPPSITEEYVTKQLEKLSRKYKINAFNSNRFKQITEQVLRKYNNGELPKISEVFYRYPRESHVAIRILPVKISNPRKDISYLLDKYQISPDWKNSNPGEVVDLIEIYKLTLGWLLSCNKDFSMDFSSYDLKLFPEAASLIKNFGSCLSGYYLSKMIFNCITSEIKGMITLYTRDKFVVRYVTQMIGSNQKFPLLCLVGEKQTKNFSRNWGVLIEEKGDLGEEKNQEKCLIFKDKTDFAKAKEVEIFKNNIWRIRTSKYQIQFLNRLFKKTKEWDLMNLVLSEPSLVLEEEWGVSWDKDKLLPLLKKEKSCEERLYYSLPLNLVPATDYKEQSAEIEQRNTYLGLDVGEFGVAYAVVRIVRDRIELLSWGFLKDPALRKIRERVQDMKKKQVMAVFSSSSTAVARVREMAIHSLRNQIHSIALAYKAKIIYEISISNFETGGNRMAKIYRSIKVSDVYRESGADTLVSEMIWGKKNKQMGNHISSYATSYTCCNCARTPFELVIDNDKEYEKGGDEFIFNVGDEKKVRGFLQKSLLGKTIKGKEVLKSIKEYARPPIREVLLEGEDVEQLLKRRGNSYIYRCPFCGYKTDADIQAALNIACRGYISDNAKDAVKEGERKLDYILEVRKLWEKNGAVLRSAKFL

SEQ ID NO: 7 - protein, 707 aa, Synthetic construct
MADTPTLFTQFLRHHLPGQRFRKDILKQAGRILANKGEDATIAFLRGKSEESPPDFQPPVKCPIIACSRPLTEWPIYQASVAIQGYVYGQSLAEFEASDPGCSKDGLLGWFDKTGVCTDYFSVQGLNLIFQNARKRYIGVQTKVTNRNEKRHKKLKRINAKRIAEGLPELTSDEPESALDETGHLIDPPGLNTNIYCYQQVSPKPLALSEVNQLPTAYAGYSTSGDDPIQPMVTKDRLSISKGQPGYIPEHQRALLSQKKHRRMRGYGLKARALLVIVRIQDDWAVIDLRSLLRNAYWRRIVQTKEPSTITKLLKLVTGDPVLDATRMVATFTYKPGIVQVRSAKCLKNKQGSKLFSERYLNETVSVTSIDLGSNNLVAVATYRLVNGNTPELLQRFTLPSHLVKDFERYKQAHDTLEDSIQKTAVASLPQGQQTEIRMWSMYGFREAQERVCQELGLADGSIPWNVMTATSTILTDLFLARGGDPKKCMFTSEPKKKKNSKQVLYKIRDRAWAKMYRTLLSKETREAWNKALWGLKRGSPDYARLSKRKEELARRCVNYTISTAEKRAQCGRTIVALEDLNIGFFHGRGKQEPGWVGLFTRKKENRWLMQALHKAFLELAHHRGYHVIEVNPAYTSQTCPVCRHCDPDNRDQHNREAFHCIGCGFRGNADLDVATHNIAMVAITGESLKRARGSVASKTPQPLAAE

SEQ ID NO: 8 - protein, 426 aa, Synthetic construct
MIKVYRYEIVKPLDLDWKEFGTILRQLQQETRFALNKATQLAWEWMGFSSDYKDNHGEYPKSKDILGYTNVHGYAYHTIKTKAYRLNSGNLSQTIKRATDRFKAYQKEILRGDMSIPSYKRDIPLDLIKENISVNRMNHGDYIASLSLLSNPAKQEMNVKRKISVIIIVRGAGKTIMDRILSGEYQVSASQIIHDDRKNKWYLNISYDFEPQTRVLDLNKIMGIDLGVAVAVYMAFQHTPARYKLEGGEIENFRRQVESRRISMLRQGKYAGGARGGHGRDKRIKPIEQLRDKIANFRDTTNHRYSRYIVDMAIKEGCGTIQMEDLTNIRDIGSRFLQNWTYYDLQQKIIYKAEEAGIKVIKIDPQYTSQRCSECGNIDSGNRIGQAIFKCRACGYEANADYNAARNIAIPNIDKIIAESIKSGGS

SEQ ID NO: 9 - protein, 509 aa, Synthetic construct
NAMIAQKTIKIKLNPTKEQIIKLNSIIEEYIKVSNFTAKKIAEIQESFTDSGLTQGTCSECGKEKTYRKYHLLKKDNKLFCITCYKRKYSQFTLQKVEFQNKTGLRNVAKLPKTYYTNAIRFASDTFSGFDEIIKKKQNRLNSIQNRLNFWKELLYNPSNRNEIKIKVVKYAPKTDTREHPHYYSEAEIKGRIKRLEKQLKKFKMPKYPEFTSETISLQRELYSWKNPDELKISSITDKNESMNYYGKEYLKRYIDLINSQTPQILLEKENNSFYLCFPITKNIEMPKIDDTFEPVGIDWGITRNIAVVSILDSKTKKPKFVKFYSAGYILGKRKHYKSLRKHFGQKKRQDKINKLGTKEDRFIDSNIHKLAFLIVKEIRNHSNKPIILMENITDNREEAEKSMRQNILLHSVKSRLQNYIAYKALWNNIPTNLVKPEHTSQICNRCGHQDRENRPKGSKLFKCVKCNYMSNADFNASINIARKFYIGEYEPFYKDNEKMKSGVNSISM

SEQ ID NO: 10 - protein, 501 aa, Synthetic construct
MEVQKTVMKTLSLRILRPLYSQEIEKEIKEEEKERRKQAGGTGELDGGFYKKLEKKHSEMFSFDRLNLLLNQLQREIAKVYNHAISELYIATIAQGNKSNKHYISSIVYNRAYGYFYNAYIALGICSKVEANFRSNELLTQQSALPTAKSDNFPIVLHKQKGAEGEDGGFRISTEGSDLIFEIPIPFYEYNGENRKEPYKWVKKGGQKPVLKLILSTFRRQRNKGWAKDEGTDAEIRKVTEGKYQVSQIEINRGKKLGEHQKWFANFSIEQPIYERKPNRSIVGGLDVGIRSPLVCAINNSFSRYSVDSNDVFKFSKQVFAFRRRLLSKNSLKRKHGHAAHKLEPITEMTEKNDKFRKKIIERWAKEVTNFFVKNQVGIVQIEDLSTMKDREDHFFNQYLRGFWPYYQMQTLIENKLKEYGIEVKRVQAKYTSQLCSNPNCRYWNNYFNFEYRKVNKFPKFKCEKCNLEISADYNAARNLSTPDIEKFVAKATKGINLPEK

SEQ ID NO: 11 - protein, 582 aa, Synthetic construct
MKVLEFKIHPTEEQVSKIDQSLAACKLLWNLSIALKEESKQRYYRKKHKFDEFSPEIWGLSYSGHYDEKEFKTLKDKEKKLLIGNPCCKIAYFKKTSNGKEYTPLNSIPIRRFMNAENIDKDAVNYLNRKKLAFYFRENTAKFIGEIETEFKKGFFKSVIKPAYDAAKKGIRGIPRFKGRRDKVETLVNGQPETIKIKSNGVIVSSKIGLLKIRGLDRLQGKAPRMAKITRKATGYYLQLTIETDDTIYKESDKCVGLDMGAVAIFTDDLGRQSEAKRYAKIQKKRLNRLQRQASRQKDNSNNQRKTYAKLARVHEKIARQRKGRNAQLAHKITSEYQSVILEDLNLKNMTAAAKPKEREDGDGYKQNGKKRKSGLNKALLDNAIGQLRTFIENKANERGRKIIRVNPKHTSQTCPNCGNIDKANRVSQSKFKCVSCGYEAHADQNAAANILIRGLRDEFLRAIGSLYKFPVSMIGKYPGLAGEFTPDLDANQESIGDAPIENAEHSISKQMKQEGNRTPTQPENGSQSLIFLSAPPQPCGDSHGTNNPKALPNKASKRSSKKPRGAIPENPDQLTIWDLLD

SEQ ID NO: 12 - protein, 1368 aa, Synthetic construct
MDKKYSIGLAIGTNSVGWAVITDEYKVPSKKFKVLGNTDRHSIKKNLIGALLFDSGETAEATRLKRTARRRYTRRKNRICYLQEIFSNEMAKVDDSFFHRLEESFLVEEDKKHERHPIFGNIVDEVAYHEKYPTIYHLRKKLVDSTDKADLRLIYLALAHMIKFRGHFLIEGDLNPDNSDVDKLFIQLVQTYNQLFEENPINASGVDAKAILSARLSKSRRLENLIAQLPGEKKNGLFGNLIALSLGLTPNFKSNFDLAEDAKLQLSKDTYDDDLDNLLAQIGDQYADLFLAAKNLSDAILLSDILRVNTEITKAPLSASMIKRYDEHHQDLTLLKALVRQQLPEKYKEIFFDQSKNGYAGYIDGGASQEEFYKFIKPILEKMDGTEELLVKLNREDLLRKQRTFDNGSIPHQIHLGELHAILRRQEDFYPFLKDNREKIEKILTFRIPYYVGPLARGNSRFAWMTRKSEETITPWNFEEVVDKGASAQSFIERMTNFDKNLPNEKVLPKHSLLYEYFTVYNELTKVKYVTEGMRKPAFLSGEQKKAIVDLLFKTNRKVTVKQLKEDYFKKIECFDSVEISGVEDRFNASLGTYHDLLKIIKDKDFLDNEENEDILEDIVLTLTLFEDREMIEERLKTYAHLFDDKVMKQLKRRRYTGWGRLSRKLINGIRDKQSGKTILDFLKSDGFANRNFMQLIHDDSLTFKEDIQKAQVSGQGDSLHEHIANLAGSPAIKKGILQTVKVVDELVKVMGRHKPENIVIEMARENQTTQKGQKNSRERMKRIEEGIKELGSQILKEHPVENTQLQNEKLYLYYLQNGRDMYVDQELDINRLSDYDVDAIVPQSFLKDDSIDNKVLTRSDKNRGKSDNVPSEEVVKKMKNYWRQLLNAKLITQRKFDNLTKAERGGLSELDKAGFIKRQLVETRQITKHVAQILDSRMNTKYDENDKLIREVKVITLKSKLVSDFRKDFQFYKVREINNYHHAHDAYLNAVVGTALIKKYPKLESEFVYGDYKVYDVRKMIAKSEQEIGKATAKYFFYSNIMNFFKTEITLANGEIRKRPLIETNGETGEIVWDKGRDFATVRKVLSMPQVNIVKKTEVQTGGFSKESILPKRNSDKLIARKKDWDPKKYGGFDSPTVAYSVLVVAKVEKGKSKKLKSVKELLGITIMERSSFEKNPIDFLEAKGYKEVKKDLIIKLPKYSLFELENGRKRMLASAGELQKGNELALPSKYVNFLYLASHYEKLKGSPEDNEQKQLFVEQHKHYLDEIIEQISEFSKRVILADANLDKVLSAYNKHRDKPIREQAENIIHLFTLTNLGAPAAFKYFDTTIDRKRYTSTKEVLDATLIHQSITGLYETRIDLSQLGGD

SEQ ID NO: 13 - protein, 1053 aa, Synthetic construct
MKRNYILGLAIGITSVGYGIIDYETRDVIDAGVRLFKEANVENNEGRRSKRGARRLKRRRRHRIQRVKKLLFDYNLLTDHSELSGINPYEARVKGLSQKLSEEEFSAALLHLAKRRGVHNVNEVEEDTGNELSTKEQISRNSKALEEKYVAELQLERLKKDGEVRGSINRFKTSDYVKEAKQLLKVQKAYHQLDQSFIDTYIDLLETRRTYYEGPGEGSPFGWKDIKEWYEMLMGHCTYFPEELRSVKYAYNADLYNALNDLNNLVITRDENEKLEYYEKFQIIENVFKQKKKPTLKQIAKEILVNEEDIKGYRVTSTGKPEFTNLKVYHDIKDITARKEIIENAELLDQIAKILTIYQSSEDIQEELTNLNSELTQEEIEQISNLKGYTGTHNLSLKAINLILDELWHTNDNQIAIFNRLKLVPKKVDLSQQKEIPTTLVDDFILSPVVKRSFIQSIKVINAIIKKYGLPNDIIIELAREKNSKDAQKMINEMQKRNRQTNERIEEIIRTTGKENAKYLIEKIKLHDMQEGKCLYSLEAIPLEDLLNNPFNYEVDHIIPRSVSFDNSFNNKVLVKQEEASKKGNRTPFQYLSSSDSKISYETFKKHILNLAKGKGRISKTKKEYLLEERDINRFSVQKDFINRNLVDTRYATRGLMNLLRSYFRVNNLDVKVKSINGGFTSFLRRKWKFKKERNKGYKHHAEDALIIANADFIFKEWKKLDKAKKVMENQMFEEKQAESMPEIETEQEYKEIFITPHQIKHIKDFKDYKYSHRVDKKPNRELINDTLYSTRKDDKGNTLIVNNLNGLYDKDNDKLKKLINKSPEKLLMYHHDPQTYQKLKLIMEQYGDEKNPLYKYYEETGNYLTKYSKKDNGPVIKKIKYYGNKLNAHLDITDDYPNSRNKVVKLSLKPYRFDVYLDNGVYKFVTVKNLDVIKKENYYEVNSKCYEEAKKLKKISNQAEFIASFYNNDLIKINGELYRVIGVNNDLLNRIEVNMIDITYREYLENMNDKRPPRIIKTIASKTQSIKKYSTDILGNLYEVKSKKHPQIIKKG

SEQ ID NO: 14 - protein, 1300 aa, Synthetic construct
MSIYQEFVNKYSLSKTLRFELIPQGKTLENIKARGLILDDEKRAKDYKKAKQIIDKYHQFFIEEILSSVCISEDLLQNYSDVYFKLKKSDDDNLQKDFKSAKDTIKKQISEYIKDSEKFKNLFNQNLIDAKKGQESDLILWLKQSKDNGIELFKANSDITDIDEALEIIKSFKGWTTYFKGFHENRKNVYSSNDIPTSIIYRIVDDNLPKFLENKAKYESLKDKAPEAINYEQIKKDLAEELTFDIDYKTSEVNQRVFSLDEVFEIANFNNYLNQSGITKFNTIIGGKFVNGENTKRKGINEYINLYSQQINDKTLKKYKMSVLFKQILSDTESKSFVIDKLEDDSDVVTTMQSFYEQIAAFKTVEEKSIKETLSLLFDDLKAQKLDLSKIYFKNDKSLTDLSQQVFDDYSVIGTAVLEYITQQIAPKNLDNPSKKEQELIAKKTEKAKYLSLETIKLALEEFNKHRDIDKQCRFEEILANFAAIPMIFDEIAQNKDNLAQISIKYQNQGKKDLLQASAEDDVKAIKDLLDQTNNLLHKLKIFHISQSEDKANILDKDEHFYLVFEECYFELANIVPLYNKIRNYITQKPYSDEKFKLNFENSTLANGWDKNKEPDNTAILFIKDDKYYLGVMNKKNNKIFDDKAIKENKGEGYKKIVYKLLPGANKMLPKVFFSAKSIKFYNPSEDILRIRNHSTHTKNGSPQKGYEKFEFNIEDCRKFIDFYKQSISKHPEWKDFGFRFSDTQRYNSIDEFYREVENQGYKLTFENISESYIDSVVNQGKLYLFQIYNKDFSAYSKGRPNLHTLYWKALFDERNLQDVVYKLNGEAELFYRKQSIPKKITHPAKEAIANKNKDNPKKESVFEYDLIKDKRFTEDKFFFHCPITINFKSSGANKFNDEINLLLKEKANDVHILSIARGERHLAYYTLVDGKGNIIKQDTFNIIGNDRMKTNYHDKLAAIEKDRDSARKDWKKINNIKEMKEGYLSQVVHEIAKLVIEYNAIVVFEDLNFGFKRGRFKVEKQVYQKLEKMLIEKLNYLVFKDNEFDKTGGVLRAYQLTAPFETFKKMGKQTGIIYYVPAGFTSKICPVTGFVNQLYPKYESVSKSQEFFSKFDKICYNLDKGYFEFSFDYKNFGDKAAKGKWTIASFGSRLINFRNSDKNHNWDTREVYPTKELEKLLKDYSIEYGHGECIKAAICGESDKKFFAKLTSVLNTILQMRNSKTGTELDYLISPVADVNGNFFDSRQAPKNMPQDADANGAYHIGLKGLMLLGRIKNNQEGKKLNLVIKNEEYFEFVQNRNN

SEQ ID NO: 15 - protein, 1082 aa, Synthetic construct
MAAFKPNSINYILGLAIGIASVGWAMVEIDEEENPIRLIDLGVRVFERAEVPKTGDSLAMARRLARSVRRLTRRRAHRLLRTRRLLKREGVLQAANFDENGLIKSLPNTPWQLRAAALDRKLTPLEWSAVLLHLIKHRGYLSQRKNEGETADKELGALLKGVAGNAHALQTGDFRTPAELALNKFEKESGHIRNQRSDYSHTFSRKDLQAELILLFEKQKEFGNPHVSGGLKEGIETLLMTQRPALSGDAVQKMLGHCTFEPAEPKAAKNTYTAERFIWLTKLNNLRILEQGSERPLTDTERATLMDEPYRKSKLTYAQARKLLGLEDTAFFKGLRYGKDNAEASTLMEMKAYHAISRALEKEGLKDKKSPLNLSPELQDEIGTAFSLFKTDEDITGRLKDRIQPEILEALLKHISFDKFVQISLKALRRIVPLMEQGKRYDEACAEIYGDHYGKKNTEEKIYLPPIPADEIRNPVVLRALSQARKVINGVVRRYGSPARIHIETAREVGKSFKDRKEIEKRQEENRKDREKAAAKFREYFPNFVGEPKSKDILKLRLYEQQHGKCLYSGKEINLGRLNEKGYVEIDAALPFSRTWDDSFNNKVLVLGSENQNKGNQTPYEYFNGKDNSREWQEFKARVETSRFPRSKKQRILLQKFDEDGFKERNLNDTRYVNRFLCQFVADRMRLTGKGKKRVFASNGQITNLLRGFWGLRKVRAENDRHHALDAVVVACSTVAMQQKITRFVRYKEMNAFDGKTIDKETGEVLHQKTHFPQPWEFFAQEVMIRVFGKPDGKPEFEEADTLEKLRTLLAEKLSSRPEAVHEYVTPLFVSRAPNRKMSGQGHMETVKSAKRLDEGVSVLRVPLTQLKLKDLEKMVNREREPKLYEALKARLEAHKDDPAKAFAEPFYKYDKAGNRTQQVKAVRVEQVQKTGVWVRNHNGIADNATMVRVDVFEKGDKYYLVPIYSWQVAKGILPDRAVVQGKDEEDWQLIDDSFNFKFSLHPNDLVEVITKKARMFGYFASCHRGTGNINIRIHDLDHKIGKNGILEGIGVKTALSFQKYQIDELGKEIRPCRLKKRPPVR

SEQ ID NO: 16 - protein, 984 aa, Synthetic construct
MARILAFAIGISSIGWAFSENDELKDCGVRIFTKVENPKTGESLALPRRLARSARKRLARRKARLNHLKHLIANEFKLNYEDYQSFDESLAKAYKGSLISPYELRFRALNELLSKQDFARVILHIAKRRGYDDIKNSDDKEKGAILKAIKQNEEKLANYQSVGEYLYKEYFQKFKENSKEFTNVRNKKESYERCIAQSFLKDELKLIFKKQREFGFSFSKKFEEEVLSVAFYKRALKDFSHLVGNCSFFTDEKRAPKNSPLAFMFVALTRIINLLNNLKNTEGILYTKDDLNALLNEVLKNGTLTYKQTKKLLGLSDDYEFKGEKGTYFIEFKKYKEFIKALGEHNLSQDDLNEIAKDITLIKDEIKLKKALAKYDLNQNQIDSLSKLEFKDHLNISFKALKLVTPLMLEGKKYDEACNELNLKVAINEDKKDFLPAFNETYYKDEVTNPVVLRAIKEYRKVLNALLKKYGKVHKINIELAREVGKNHSQRAKIEKEQNENYKAKKDAELECEKLGLKINSKNILKLRLFKEQKEFCAYSGEKIKISDLQDEKMLEIDAIYPYSRSFDDSYMNKVLVFTKQNQEKLNQTPFEAFGNDSAKWQKIEVLAKNLPTKKQKRILDKNYKDKEQKNFKDRNLNDTRYIARLVLNYTKDYLDFLPLSDDENTKLNDTQKGSKVHVEAKSGMLTSALRHTWGFSAKDRNNHLHHAIDAVIIAYANNSIVKAFSDFKKEQESNSAELYAKKISELDYKNKRKFFEPFSGFRQKVLDKIDEIFVSKPERKKPSGALHEETFRKEEEFYQSYGGKEGVLKALELGKIRKVNGKIVKNGDMFRVDIFKHKKTNKFYAVPIYTMDFALKVLPNKAVARSKKGEIKDWILMDENYEFCFSLYKDSLILIQTKDMQEPEFVYYNAFTSSTVSLIVSKHDNKFETLSKNQKILFKNANEKEVIAKSIGIQNLKVFEKYIVSALGEVTKAEFRQREDFKK

SEQ ID NO: 17 - protein, 1122 aa, Synthetic construct
MGSDLVLGLAIGIGSVGVGILNKVTGEIIHKNSRIFPAAQAENNLVRRTNRQGRRLARRKKHRRVRLNRLFEESGLITDFTKISINLNPYQLRVKGLTDELSNEELFIALKNMVKHRGISYLDDASDDGNSSVGDYAQIVKENSKQLETKTPGQIQLERYQTYGQLRGDFTVEKDGKKHRLINVFPTSAYRSEALRILQTQQEFNPQITDEFINRYLEILTGKRKYYHGPGNEKSRTDYGRYRTSGETLDNIFGILIGKCTFYPDEFRAAKASYTAQEFNLLNDLNNLTVPTETKKLSKEQKNQIINYVKNEKAMGPAKLFKYIAKLLSCDVADIKGYRIDKSGKAEIHTFEAYRKMKTLETLDIEQMDRETLDKLAYVLTLNTEREGIQEALEHEFADGSFSQKQVDELVQFRKANSSIFGKGWHNFSVKLMMELIPELYETSEEQMTILTRLGKQKTTSSSNKTKYIDEKLLTEEIYNPVVAKSVRQAIKIVNAAIKEYGDFDNIVIEMARETNEDDEKKAIQKIQKANKDEKDAAMLKAANQYNGKAELPHSVFHGHKQLATKIRLWHQQGERCLYTGKTISIHDLINNSNQFEVDAILPLSITFDDSLANKVLVYATANQEKGQRTPYQALDSMDDAWSFRELKAFVRESKTLSNKKKEYLLTEEDISKFDVRKKFIERNLVDTRYASRVVLNALQEHFRAHKIDTKVSVVRGQFTSQLRRHWGIEKTRDTYHHHAVDALIIAASSQLNLWKKQKNTLVSYSEDQLLDIETGELISDDEYKESVFKAPYQHFVDTLKSKEFEDSILFSYQVDSKFNRKISDATIYATRQAKVGKDKADETYVLGKIKDIYTQDGYDAFMKIYKKDKSKFLMYRHDPQTFEKVIEPILENYPNKQINEKGKEVPCNPFLKYKEEHGYIRKYSKKGNGPEIKSLKYYDSKLGNHIDITPKDSNNKVVLQSVSPWRADVYFNKTTGKYEILGLKYADLQFEKGTGTYKISQEKYNDIKKKEGVDSDSEFKFTLYKNDLLLVKDTETKEQQLFRFLSRTMPKQKHYVELKPYDKQKFEGGEALIKVLGNVANSGQCKKGLGKSNISIYKVRTDVLGNQHIIKNEGDKPKLDF

SEQ ID NO: 18 - protein, 1388 aa, Synthetic construct
MTKPYSIGLAIGTNSVGWAVITDNYKVPSKKMKVLGNTSKKYIKKNLLGVLLFDSGITAEGRRLKRTARRRYTRRRNRILYLQEIFSTEMATLDDAFFQRLDDSFLVPDDKRDSKYPIFGNLVEEKVYHDEFPTIYHLRKYLADSTKKADLRLVYLALAHMIKYRGHFLIEGEFNSKNNDIQKNFQDFLDTYNAIFESDLSLENSKQLEEIVKDKISKLEKKDRILKLFPGEKNSGIFSEFLKLIVGNQADFRKCFNLDEKASLHFSKESYDEDLETLLGYIGDDYSDVFLKAKKLYDAILLSGFLTVTDNETEAPLSSAMIKRYNEHKEDLALLKEYIRNISLKTYNEVFKDDTKNGYAGYIDGKTNQEDFYVYLKNLLAEFEGADYFLEKIDREDFLRKQRTFDNGSIPYQIHLQEMRAILDKQAKFYPFLAKNKERIEKILTFRIPYYVGPLARGNSDFAWSIRKRNEKITPWNFEDVIDKESSAEAFINRMTSFDLYLPEEKVLPKHSLLYETFNVYNELTKVRFIAESMRDYQFLDSKQKKDIVRLYFKDKRKVTDKDIIEYLHAIYGYDGIELKGIEKQFNSSLSTYHDLLNIINDKEFLDDSSNEAIIEEIIHTLTIFEDREMIKQRLSKFENIFDKSVLKKLSRRHYTGWGKLSAKLINGIRDEKSGNTILDYLIDDGISNRNFMQLIHDDALSFKKKIQKAQIIGDEDKGNIKEVVKSLPGSPAIKKGILQSIKIVDELVKVMGGRKPESIVVEMARENQYTNQGKSNSQQRLKRLEKSLKELGSKILKENIPAKLSKIDNNALQNDRLYLYYLQNGKDMYTGDDLDIDRLSNYDIDHIIPQAFLKDNSIDNKVLVSSASARGKSDDFPSLEVVKKRKTFWYQLLKSKLISQRKFDNLTKAERGGLLPEDKAGFIQRQLVETRQITKHVARLLDEKFNNKKDENNRAVRTVKIITLKSTLVSQFRKDFELYKVREINDFHHAHDAYLNAVIASALLKKYPKLEPEFVYGDYPKYNSFRERKSATEKVYFYSNIMNIFKKSISLADGRVIERPLIEVNEETGESVWNKESDLATVRRVLSYPQVNVVKKVEEQNHGLDRGKPKGLFNANLSSKPKPNSNENLVGAKEYLDPKKYGGYAGISNSFAVLVKGTIEKGAKKKITNVLEFQGISILDRINYRKDKLNFLLEKGYKDIELIIELPKYSLFELSDGSRRMLASILSTNNKRGEIHKGNQIFLSQKFVKLLYHAKRISNTINENHRKYVENHKKEFEELFYYILEFNENYVGAKKNGKLLNSAFQSWQNHSIDELCSSFIGPTGSERKGLFELTSRGSAADFEFLGVKIPRYRDYTPSSLLKDATLIHQSVTGLYETRIDLAKLGEG

SEQ ID NO: 19 - protein, 1228 aa, Synthetic construct
MSKLEKFTNCYSLSKTLRFKAIPVGKTQENIDNKRLLVEDEKRAEDYKGVKKLLDRYYLSFINDVLHSIKLKNLNNYISLFRKKTRTEKENKELENLEINLRKEIAKAFKGNEGYKSLFKKDIIETILPEFLDDKDEIALVNSFNGFTTAFTGFFDNRENMFSEEAKSTSIAFRCINENLTRYISNMDIFEKVDAIFDKHEVQEIKEKILNSDYDVEDFFEGEFFNFVLTQEGIDVYNAIIGGFVTESGEKIKGLNEYINLYNQKTKQKLPKFKPLYKQVLSDRESLSFYGEGYTSDEEVLEVFRNTLNKNSEIFSSIKKLEKLFKNFDEYSSAGIFVKNGPAISTISKDIFGEWNVIRDKWNAEYDDIHLKKKAVVTEKYEDDRRKSFKKIGSFSLEQLQEYADADLSVVEKLKEIIIQKVDEIYKVYGSSEKLFDADFVLEKSLKKNDAVVAIMKDLLDSVKSFENYIKAFFGEGKETNRDESFYGDFVLAYDILLKVDHIYDAIRNYVTQKPYSKDKFKLYFQNPQFMGGWDKDKETDYRATILRYGSKYYLAIMDKKYAKCLQKIDKDDVNGNYEKINYKLLPGPNKMLPKVFFSKKWMAYYNPSEDIQKIYKNGTFKKGDMFNLNDCHKLIDFFKDSISRYPKWSNAYDFNFSETEKYKDIAGFYREVEEQGYKVSFESASKKEVDKLVEEGKLYMFQIYNKDFSDKSHGTPNLHTMYFKLLFDENNHGQIRLSGGAELFMRRASLKKEELVVHPANSPIANKNPDNPKKTTTLSYDVYKDKRFSEDQYELHIPIAINKCPKNIFKINTEVRVLLKHDDNPYVIGIARGERNLLYIVVVDGKGNIVEQYSLNEIINNFNGIRIKTDYHSLLDKKEKERFEARQNWTSIENIKELKAGYISQVVHKICELVEKYDAVIALEDLNSGFKNSRVKVEKQVYQKFEKMLIDKLNYMVDKKSNPCATGGALKGYQITNKFESFKSMSTQNGFIFYIPAWLTSKIDPSTGFVNLLKTKYTSIADSKKFISSFDRIMYVPEEDLFEFALDYKNFSRTDADYIKKWKLYSYGNRIRIFRNPKKNNVFDWEEVCLTSAYKELFNKYGINYQQGDIRALLCEQSDKAFYSSFMALMSLMLQMRNSITGRTDVDFLISPVKNSDGIFYDSRNYEAQENAILPKNADANGAYNIARKVLWAIGQFKKAEDEKLDKVKIAISNKEWLEYAQTSVKH

SEQ ID NO: 20 - protein, 1307 aa, Synthetic construct
MTQFEGFTNLYQVSKTLRFELIPQGKTLKHIQEQGFIEEDKARNDHYKELKPIIDRIYKTYADQCLQLVQLDWENLSAAIDSYRKEKTEETRNALIEEQATYRNAIHDYFIGRTDNLTDAINKRHAEIYKGLFKAELFNGKVLKQLGTVTTTEHENALLRSFDKFTTYFSGFYENRKNVFSAEDISTAIPHRIVQDNFPKFKENCHIFTRLITAVPSLREHFENVKKAIGIFVSTSIEEVFSFPFYNQLLTQTQIDLYNQLLGGISREAGTEKIKGLNEVLNLAIQKNDETAHIIASLPHRFIPLFKQILSDRNTLSFILEEFKSDEEVIQSFCKYKTLLRNENVLETAEALFNELNSIDLTHIFISHKKLETISSALCDHWDTLRNALYERRISELTGKITKSAKEKVQRSLKHEDINLQEIISAAGKELSEAFKQKTSEILSHAHAALDQPLPTTLKKQEEKEILKSQLDSLLGLYHLLDWFAVDESNEVDPEFSARLTGIKLEMEPSLSFYNKARNYATKKPYSVEKFKLNFQMPTLASGWDVNKEKNNGAILFVKNGLYYLGIMPKQKGRYKALSFEPTEKTSEGFDKMYYDYFPDAAKMIPKCSTQLKAVTAHFQTHTTPILLSNNFIEPLEITKEIYDLNNPEKEPKKFQTAYAKKTGDQKGYREALCKWIDFTRDFLSKYTKTTSIDLSSLRPSSQYKDLGEYYAELNPLLYHISFQRIAEKEIMDAVETGKLYLFQIYNKDFAKGHHGKPNLHTLYWTGLFSPENLAKTSIKLNGQAELFYRPKSRMKRMAHRLGEKMLNKKLKDQKTPIPDTLYQELYDYVNHRLSHDLSDEARALLPNVITKEVSHEIIKDRRFTSDKFFFHVPITLNYQAANSPSKFNQRVNAYLKEHPETPIIGIARGERNLIYITVIDSTGKILEQRSLNTIQQFDYQKKLDNREKERVAARQAWSVVGTIKDLKQGYLSQVIHEIVDLMIHYQAVVVLENLNFGFKSKRTGIAEKAVYQQFEKMLIDKLNCLVLKDYPAEKVGGVLNPYQLTDQFTSFAKMGTQSGFLFYVPAPYTSKIDPLTGFVDPFVWKTIKNHESRKHFLEGFDFLHYDVKTGDFILHFKMNRNLSFQRGLPGFMPAWDIVFEKNETQFDAKGTPFIAGKRIVPVIENHRFTGRYRDLYPANELIALLEEKGIVFRDGSNILPKLLENDDSHAIDTMVALIRSVLQMRNSNAATGEDYINSPVRDLNGVCFDSRFQNPEWPMDADANGAYHIALKGQLLLNHLKESKDLKLQNGISNQDWLAYIQELRN

SEQ ID NO: 21 - protein, 1307 aa, Synthetic construct
MTQFEGFTNLYQVSKTLRFELIPQGKTLKHIQEQGFIEEDKARNDHYKELKPIIDRIYKTYADQCLQLVQLDWENLSAAIDSYRKEKTEETRNALIEEQATYRNAIHDYFIGRTDNLTDAINKRHAEIYKGLFKAELFNGKVLKQLGTVTTTEHENALLRSFDKFTTYFSGFYRNRKNVFSAEDISTAIPHRIVQDNFPKFKENCHIFTRLITAVPSLREHFENVKKAIGIFVSTSIEEVFSFPFYNQLLTQTQIDLYNQLLGGISREAGTEKIKGLNEVLNLAIQKNDETAHIIASLPHRFIPLFKQILSDRNTLSFILEEFKSDEEVIQSFCKYKTLLRNENVLETAEALFNELNSIDLTHIFISHKKLETISSALCDHWDTLRNALYERRISELTGKITKSAKEKVQRSLKHEDINLQEIISAAGKELSEAFKQKTSEILSHAHAALDQPLPTTLKKQEEKEILKSQLDSLLGLYHLLDWFAVDESNEVDPEFSARLTGIKLEMEPSLSFYNKARNYATKKPYSVEKFKLNFQMPTLARGWDVNREKNNGAILFVKNGLYYLGIMPKQKGRYKALSFEPTEKTSEGFDKMYYDYFPDAAKMIPKCSTQLKAVTAHFQTHTTPILLSNNFIEPLEITKEIYDLNNPEKEPKKFQTAYAKKTGDQKGYREALCKWIDFTRDFLSKYTKTTSIDLSSLRPSSQYKDLGEYYAELNPLLYHISFQRIAEKEIMDAVETGKLYLFQIYNKDFAKGHHGKPNLHTLYWTGLFSPENLAKTSIKLNGQAELFYRPKSRMKRMAHRLGEKMLNKKLKDQKTPIPDTLYQELYDYVNHRLSHDLSDEARALLPNVITKEVSHEIIKDRRFTSDKFFFHVPITLNYQAANSPSKFNQRVNAYLKEHPETPIIGIARGERNLIYITVIDSTGKILEQRSLNTIQQFDYQKKLDNREKERVAARQAWSVVGTIKDLKQGYLSQVIHEIVDLMIHYQAVVVLENLNFGFKSKRTGIAEKAVYQQFEKMLIDKLNCLVLKDYPAEKVGGVLNPYQLTDQFTSFAKMGTQSGFLFYVPAPYTSKIDPLTGFVDPFVWKTIKNHESRKHFLEGFDFLHYDVKTGDFILHFKMNRNLSFQRGLPGFMPAWDIVFEKNETQFDAKGTPFIAGKRIVPVIENHRFTGRYRDLYPANELIALLEEKGIVFRDGSNILPKLLENDDSHAIDTMVALIRSVLQMRNSNAATGEDYINSPVRDLNGVCFDSRFQNPEWPMDADANGAYHIALKGQLLLNHLKESKDLKLQNGISNQDWLAYIQELRN

SEQ ID NO: 22 - protein, 1307 aa, Synthetic construct
MTQFEGFTNLYQVSKTLRFELIPQGKTLKHIQEQGFIEEDKARNDHYKELKPIIDRIYKTYADQCLQLVQLDWENLSAAIDSYRKEKTEETRNALIEEQATYRNAIHDYFIGRTDNLTDAINKRHAEIYKGLFKAELFNGKVLKQLGTVTTTEHENALLRSFDKFTTYFSGFYRNRKNVFSAEDISTAIPHRIVQDNFPKFKENCHIFTRLITAVPSLREHFENVKKAIGIFVSTSIEEVFSFPFYNQLLTQTQIDLYNQLLGGISREAGTEKIKGLNEVLALAIQKNDETAHIIASLPHRFIPLFKQILSDRNTLSFILEEFKSDEEVIQSFCKYKTLLRNENVLETAEALFNELNSIDLTHIFISHKKLETISSALCDHWDTLRNALYERRISELTGKITKSAKEKVQRSLKHEDINLQEIISAAGKELSEAFKQKTSEILSHAHAALDQPLPTTLKKQEEKEILKSQLDSLLGLYHLLDWFAVDESNEVDPEFSARLTGIKLEMEPSLSFYNKARNYATKKPYSVEKFKLNFQMPTLARGWDVNREKNNGAILFVKNGLYYLGIMPKQKGRYKALSFEPTEKTSEGFDKMYYDYFPDAAKMIPKCSTQLKAVTAHFQTHTTPILLSNNFIEPLEITKEIYDLNNPEKEPKKFQTAYAKKTGDQKGYREALCKWIDFTRDFLSKYTKTTSIDLSSLRPSSQYKDLGEYYAELNPLLYHISFQRIAEKEIMDAVETGKLYLFQIYNKDFAKGHHGKPNLHTLYWTGLFSPENLAKTSIKLNGQAELFYRPKSRMKRMAHRLGEKMLNKKLKDQKTPIPDTLYQELYDYVNHRLSHDLSDEARALLPNVITKEVSHEIIKDRRFTSDKFFFHVPITLNYQAANSPSKFNQRVNAYLKEHPETPIIGIARGERNLIYITVIDSTGKILEQRSLNTIQQFDYQKKLDNREKERVAARQAWSVVGTIKDLKQGYLSQVIHEIVDLMIHYQAVVVLENLNFGFKSKRTGIAEKAVYQQFEKMLIDKLNCLVLKDYPAEKVGGVLNPYQLTDQFTSFAKMGTQSGFLFYVPAPYTSKIDPLTGFVDPFVWKTIKNHESRKHFLEGFDFLHYDVKTGDFILHFKMNRNLSFQRGLPGFMPAWDIVFEKNETQFDAKGTPFIAGKRIVPVIENHRFTGRYRDLYPANELIALLEEKGIVFRDGSNILPKLLENDDSHAIDTMVALIRSVLQMRNSNAATGEDYINSPVRDLNGVCFDSRFQNPEWPMDADANGAYHIALKGQLLLNHLKESKDLKLQNGISNQDWLAYIQELRN

SEQ ID NO: 23 - protein, 1307 aa, Synthetic construct
MTQFEGFTNLYQVSKTLRFELIPQGKTLKHIQEQGFIEEDKARNDHYKELKPIIDRIYKTYADQCLQLVQLDWENLSAAIDSYRKEKTEETRNALIEEQATYRNAIHDYFIGRTDNLTDAINKRHAEIYKGLFKAELFNGKVLKQLGTVTTTEHENALLRSFDKFTTYFSGFYENRKNVFSAEDISTAIPHRIVQDNFPKFKENCHIFTRLITAVPSLREHFENVKKAIGIFVSTSIEEVFSFPFYNQLLTQTQIDLYNQLLGGISREAGTEKIKGLNEVLNLAIQKNDETAHIIASLPHRFIPLFKQILSDRNTLSFILEEFKSDEEVIQSFCKYKTLLRNENVLETAEALFNELNSIDLTHIFISHKKLETISSALCDHWDTLRNALYERRISELTGKITKSAKEKVQRSLKHEDINLQEIISAAGKELSEAFKQKTSEILSHAHAALDQPLPTTLKKQEEKEILKSQLDSLLGLYHLLDWFAVDESNEVDPEFSARLTGIKLEMEPSLSFYNKARNYATKKPYSVEKFKLNFQMPTLARGWDVNVEKNRGAILFVKNGLYYLGIMPKQKGRYKALSFEPTEKTSEGFDKMYYDYFPDAAKMIPKCSTQLKAVTAHFQTHTTPILLSNNFIEPLEITKEIYDLNNPEKEPKKFQTAYAKKTGDQKGYREALCKWIDFTRDFLSKYTKTTSIDLSSLRPSSQYKDLGEYYAELNPLLYHISFQRIAEKEIMDAVETGKLYLFQIYNKDFAKGHHGKPNLHTLYWTGLFSPENLAKTSIKLNGQAELFYRPKSRMKRMAHRLGEKMLNKKLKDQKTPIPDTLYQELYDYVNHRLSHDLSDEARALLPNVITKEVSHEIIKDRRFTSDKFFFHVPITLNYQAANSPSKFNQRVNAYLKEHPETPIIGIARGERNLIYITVIDSTGKILEQRSLNTIQQFDYQKKLDNREKERVAARQAWSVVGTIKDLKQGYLSQVIHEIVDLMIHYQAVVVLENLNFGFKSKRTGIAEKAVYQQFEKMLIDKLNCLVLKDYPAEKVGGVLNPYQLTDQFTSFAKMGTQSGFLFYVPAPYTSKIDPLTGFVDPFVWKTIKNHESRKHFLEGFDFLHYDVKTGDFILHFKMNRNLSFQRGLPGFMPAWDIVFEKNETQFDAKGTPFIAGKRIVPVIENHRFTGRYRDLYPANELIALLEEKGIVFRDGSNILPKLLENDDSHAIDTMVALIRSVLQMRNSNAATGEDYINSPVRDLNGVCFDSRFQNPEWPMDADANGAYHIALKGQLLLNHLKESKDLKLQNGISNQDWLAYIQELRN

SEQ ID NO: 24 - protein, 1307 aa, Synthetic construct
MTQFEGFTNLYQVSKTLRFELIPQGKTLKHIQEQGFIEEDKARNDHYKELKPIIDRIYKTYADQCLQLVQLDWENLSAAIDSYRKEKTEETRNALIEEQATYRNAIHDYFIGRTDNLTDAINKRHAEIYKGLFKAELFNGKVLKQLGTVTTTEHENALLRSFDKFTTYFSGFYENRKNVFSAEDISTAIPHRIVQDNFPKFKENCHIFTRLITAVPSLREHFENVKKAIGIFVSTSIEEVFSFPFYNQLLTQTQIDLYNQLLGGISREAGTEKIKGLNEVLNLAIQKNDETAHIIASLPHRFIPLFKQILSDRNTLSFILEEFKSDEEVIQSFCKYKTLLRNENVLETAEALFNELNSIDLTHIFISHKKLETISSALCDHWDTLRNALYERRISELTGKITKSAKEKVQRSLKHEDINLQEIISAAGKELSEAFKQKTSEILSHAHAALDQPLPTTLKKQEEKEILKSQLDSLLGLYHLLDWFAVDESNEVDPEFSARLTGIKLEMEPSLSFYNKARNYATKKPYSVEKFKLNFQMPTLARGWDVNKEKNNGAILFVKNGLYYLGIMPKQKGRYKALSFEPTEKTSEGFDKMYYDYFPDAAKMIPRCSTQLKAVTAHFQTHTTPILLSNNFIEPLEITKEIYDLNNPEKEPKKFQTAYAKKTGDQKGYREALCKWIDFTRDFLSKYTKTTSIDLSSLRPSSQYKDLGEYYAELNPLLYHISFQRIAEKEIMDAVETGKLYLFQIYNKDFAKGHHGKPNLHTLYWTGLFSPENLAKTSIKLNGQAELFYRPKSRMKRMAHRLGEKMLNKKLKDQKTPIPDTLYQELYDYVNHRLSHDLSDEARALLPNVITKEVSHEIIKDRRFTSDKFFFHVPITLNYQAANSPSKFNQRVNAYLKEHPETPIIGIARGERNLIYITVIDSTGKILEQRSLNTIQQFDYQKKLDNREKERVAARQAWSVVGTIKDLKQGYLSQVIHEIVDLMIHYQAVVVLENLNFGFKSKRTGIAEKAVYQQFEKMLIDKLNCLVLKDYPAEKVGGVLNPYQLTDQFTSFAKMGTQSGFLFYVPAPYTSKIDPLTGFVDPFVWKTIKNHESRKHFLEGFDFLHYDVKTGDFILHFKMNRNLSFQRGLPGFMPAWDIVFEKNETQFDAKGTPFIAGKRIVPVIENHRFTGRYRDLYPANELIALLEEKGIVFRDGSNILPKLLENDDSHAIDTMVALIRSVLQMRNSNAATGEDYINSPVRDLNGVCFDSRFQNPEWPMDADANGAYHIALKGQLLLNHLKESKDLKLQNGISNQDWLAYIQELRN

SEQ ID NO: 25 - protein, 986 aa, Synthetic construct
MEKRINKIRKKLSADNATKPVSRSGPMKTLLVRVMTDDLKKRLEKRRKKPEVMPQVISNNAANNLRMLLDDYTKMKEAILQVYWQEFKDDHVGLMCKFAQPASKKIDQNKLKPEMDEKGNLTTAGFACSQCGQPLFVYKLEQVSEKGKAYTNYFGRCNVAEHEKLILLAQLKPEKDSDEAVTYSLGKFGQRALDFYSIHVTKESTHPVKPLAQIAGNRYASGPVGKALSDACMGTIASFLSKYQDIIIEHQKVVKGNQKRLESLRELAGKENLEYPSVTLPPQPHTKEGVDAYNEVIARVRMWVNLNLWQKLKLSRDDAKPLLRLKGFPSFPVVERRENEVDWWNTINEVKKLIDAKRDMGRVFWSGVTAEKRNTILEGYNYLPNENDHKKREGSLENPKKPAKRQFGDLLLYLEKKYAGDWGKVFDEAWERIDKKIAGLTSHIEREEARNAEDAQSKAVLTDWLRAKASFVLERLKEMDEKEFYACEIQLQKWYGDLRGNPFAVEAENRVVDISGFSIGSDGHSIQYRNLLAWKYLENGKREFYLLMNYGKKGRIRFTDGTDIKKSGKWQGLLYGGGKAKVIDLTFDPDDEQLIILPLAFGTRQGREFIWNDLLSLETGLIKLANGRVIEKTIYNKKIGRDEPALFVALTFERREVVDPSNIKPVNLIGVARGENIPAVIALTDPEGCPLPEFKDSSGGPTDILRIGEGYKEKQRAIQAAKEVEQRRAGGYSRKFASKSRNLADDMVRNSARDLFYHAVTHDAVLVFANLSRGFGRQGKRTFMTERQYTKMEDWLTAKLAYEGLTSKTYLSKTLAQYTSKTCSNCGFTITTADYDGMLVRLKKTSDGWATTLNNKELKAEGQITYYNRYKRQTVEKELSAELDRLSEESGNNDISKWTKGRRDEALFLLKKRFSHRPVQEQFVCLDCGHEVHAAEQAALNIARSWLFLNSNSTEFKSYKSGKQPFVGAWQAFYKRRLKEVWKPNA

SEQ ID NO: 26 - protein, 757 aa, Synthetic construct
MPKPAVESEFSKVLKKHFPGERFRSSYMKRGGKILAAQGEEAVVAYLQGKSEEEPPNFQPPAKCHVVTKSRDFAEWPIMKASEAIQRYIYALSTTERAACKPGKSSESHAAWFAATGVSNHGYSHVQGLNLIFDHTLGRYDGVLKKVQLRNEKARARLESINASRADEGLPEIKAEEEEVATNETGHLLQPPGINPSFYVYQTISPQAYRPRDEIVLPPEYAGYVRDPNAPIPLGVVRNRCDIQKGCPGYIPEWQREAGTAISPKTGKAVTVPGLSPKKNKRMRRYWRSEKEKAQDALLVTVRIGTDWVVIDVRGLLRNARWRTIAPKDISLNALLDLFTGDPVIDVRRNIVTFTYTLDACGTYARKWTLKGKQTKATLDKLTATQTVALVAIALGQTNPISAGISRVTQENGALQCEPLDRFTLPDDLLKDISAYRIAWDRNEEELRARSVEALPEAQQAEVRALDGVSKETARTQLCADFGLDPKRLPWDKMSSNTTFISEALLSNSVSRDQVFFTPAPKKGAKKKAPVEVMRKDRTWARAYKPRLSVEAQKLKNEALWALKRTSPEYLKLSRRKEELCRRSINYVIEKTRRRTQCQIVIPVIEDLNVRFFHGSGKRLPGWDNFFTAKKENRWFIQGLHKAFSDLRTHRSFYVFEVRPERTSITCPKCGHCEVGNRDGEAFQCLSCGKTCNADLDVATHNLTQVALTGKTMPKREEPRDAQGTAPARKTKKASKSKAPPAEREDQTPAQEPSQTS

SEQ ID NO: 27 - protein, 1368 aa, Synthetic construct
MDKKYSIGLAIGTNSVGWAVITDEYKVPSKKFKVLGNTDRHSIKKNLIGALLFDSGETAEATRLKRTARRRYTRRKNRICYLQEIFSNEMAKVDDSFFHRLEESFLVEEDKKHERHPIFGNIVDEVAYHEKYPTIYHLRKKLVDSTDKADLRLIYLALAHMIKFRGHFLIEGDLNPDNSDVDKLFIQLVQTYNQLFEENPINASGVDAKAILSARLSKSRRLENLIAQLPGEKKNGLFGNLIALSLGLTPNFKSNFDLAEDAKLQLSKDTYDDDLDNLLAQIGDQYADLFLAAKNLSDAILLSDILRVNTEITKAPLSASMIKRYDEHHQDLTLLKALVRQQLPEKYKEIFFDQSKNGYAGYIDGGASQEEFYKFIKPILEKMDGTEELLVKLNREDLLRKQRTFDNGSIPHQIHLGELHAILRRQEDFYPFLKDNREKIEKILTFRIPYYVGPLARGNSRFAWMTRKSEETITPWNFEEVVDKGASAQSFIERMTNFDKNLPNEKVLPKHSLLYEYFTVYNELTKVKYVTEGMRKPAFLSGEQKKAIVDLLFKTNRKVTVKQLKEDYFKKIECFDSVEISGVEDRFNASLGTYHDLLKIIKDKDFLDNEENEDILEDIVLTLTLFEDREMIEERLKTYAHLFDDKVMKQLKRRRYTGWGRLSRKLINGIRDKQSGKTILDFLKSDGFANRNFMQLIHDDSLTFKEDIQKAQVSGQGDSLHEHIANLAGSPAIKKGILQTVKVVDELVKVMGRHKPENIVIEMARENQTTQKGQKNSRERMKRIEEGIKELGSQILKEHPVENTQLQNEKLYLYYLQNGRDMYVDQELDINRLSDYDVDAIVPQSFLKDDSIDNKVLTRSDKNRGKSDNVPSEEVVKKMKNYWRQLLNAKLITQRKFDNLTKAERGGLSELDKAGFIKRQLVETRQITKHVAQILDSRMNTKYDENDKLIREVKVITLKSKLVSDFRKDFQFYKVREINNYHHAHDAYLNAVVGTALIKKYPKLESEFVYGDYKVYDVRKMIAKSEQEIGKATAKYFFYSNIMNFFKTEITLANGEIRKRPLIETNGETGEIVWDKGRDFATVRKVLSMPQVNIVKKTEVQTGGFSKESILPKRNSDKLIARKKDWDPKKYGGFVSPTVAYSVLVVAKVEKGKSKKLKSVKELLGITIMERSSFEKNPIDFLEAKGYKEVKKDLIIKLPKYSLFELENGRKRMLASARELQKGNELALPSKYVNFLYLASHYEKLKGSPEDNEQKQLFVEQHKHYLDEIIEQISEFSKRVILADANLDKVLSAYNKHRDKPIREQAENIIHLFTLTNLGAPAAFKYFDTTIDRKEYRSTKEVLDATLIHQSITGLYETRIDLSQLGGD

SEQ ID NO: 28 - protein, 1368 aa, Synthetic construct
MDKKYSIGLAIGTNSVGWAVITDEYKVPSKKFKVLGNTDRHSIKKNLIGALLFDSGETAEATRLKRTARRRYTRRKNRICYLQEIFSNEMAKVDDSFFHRLEESFLVEEDKKHERHPIFGNIVDEVAYHEKYPTIYHLRKKLVDSTDKADLRLIYLALAHMIKFRGHFLIEGDLNPDNSDVDKLFIQLVQTYNQLFEENPINASGVDAKAILSARLSKSRRLENLIAQLPGEKKNGLFGNLIALSLGLTPNFKSNFDLAEDAKLQLSKDTYDDDLDNLLAQIGDQYADLFLAAKNLSDAILLSDILRVNTEITKAPLSASMIKRYDEHHQDLTLLKALVRQQLPEKYKEIFFDQSKNGYAGYIDGGASQEEFYKFIKPILEKMDGTEELLVKLNREDLLRKQRTFDNGSIPHQIHLGELHAILRRQEDFYPFLKDNREKIEKILTFRIPYYVGPLARGNSRFAWMTRKSEETITPWNFEEVVDKGASAQSFIERMTNFDKNLPNEKVLPKHSLLYEYFTVYNELTKVKYVTEGMRKPAFLSGEQKKAIVDLLFKTNRKVTVKQLKEDYFKKIECFDSVEISGVEDRFNASLGTYHDLLKIIKDKDFLDNEENEDILEDIVLTLTLFEDREMIEERLKTYAHLFDDKVMKQLKRRRYTGWGRLSRKLINGIRDKQSGKTILDFLKSDGFANRNFMQLIHDDSLTFKEDIQKAQVSGQGDSLHEHIANLAGSPAIKKGILQTVKVVDELVKVMGRHKPENIVIEMARENQTTQKGQKNSRERMKRIEEGIKELGSQILKEHPVENTQLQNEKLYLYYLQNGRDMYVDQELDINRLSDYDVDAIVPQSFLKDDSIDNKVLTRSDKNRGKSDNVPSEEVVKKMKNYWRQLLNAKLITQRKFDNLTKAERGGLSELDKAGFIKRQLVETRQITKHVAQILDSRMNTKYDENDKLIREVKVITLKSKLVSDFRKDFQFYKVREINNYHHAHDAYLNAVVGTALIKKYPKLESEFVYGDYKVYDVRKMIAKSEQEIGKATAKYFFYSNIMNFFKTEITLANGEIRKRPLIETNGETGEIVWDKGRDFATVRKVLSMPQVNIVKKTEVQTGGFSKESILPKRNSDKLIARKKDWDPKKYGGFESPTVAYSVLVVAKVEKGKSKKLKSVKELLGITIMERSSFEKNPIDFLEAKGYKEVKKDLIIKLPKYSLFELENGRKRMLASAGELQKGNELALPSKYVNFLYLASHYEKLKGSPEDNEQKQLFVEQHKHYLDEIIEQISEFSKRVILADANLDKVLSAYNKHRDKPIREQAENIIHLFTLTNLGAPAAFKYFDTTIDRKQYRSTKEVLDATLIHQSITGLYETRIDLSQLGGD

SEQ ID NO: 29 - protein, 1368 aa, Synthetic construct
MDKKYSIGLAIGTNSVGWAVITDEYKVPSKKFKVLGNTDRHSIKKNLIGALLFDSGETAEATRLKRTARRRYTRRKNRICYLQEIFSNEMAKVDDSFFHRLEESFLVEEDKKHERHPIFGNIVDEVAYHEKYPTIYHLRKKLVDSTDKADLRLIYLALAHMIKFRGHFLIEGDLNPDNSDVDKLFIQLVQTYNQLFEENPINASGVDAKAILSARLSKSRRLENLIAQLPGEKKNGLFGNLIALSLGLTPNFKSNFDLAEDAKLQLSKDTYDDDLDNLLAQIGDQYADLFLAAKNLSDAILLSDILRVNTEITKAPLSASMIKRYDEHHQDLTLLKALVRQQLPEKYKEIFFDQSKNGYAGYIDGGASQEEFYKFIKPILEKMDGTEELLVKLNREDLLRKQRTFDNGSIPHQIHLGELHAILRRQEDFYPFLKDNREKIEKILTFRIPYYVGPLARGNSRFAWMTRKSEETITPWNFEEVVDKGASAQSFIERMTNFDKNLPNEKVLPKHSLLYEYFTVYNELTKVKYVTEGMRKPAFLSGEQKKAIVDLLFKTNRKVTVKQLKEDYFKKIECFDSVEISGVEDRFNASLGTYHDLLKIIKDKDFLDNEENEDILEDIVLTLTLFEDREMIEERLKTYAHLFDDKVMKQLKRRRYTGWGRLSRKLINGIRDKQSGKTILDFLKSDGFANRNFMQLIHDDSLTFKEDIQKAQVSGQGDSLHEHIANLAGSPAIKKGILQTVKVVDELVKVMGRHKPENIVIEMARENQTTQKGQKNSRERMKRIEEGIKELGSQILKEHPVENTQLQNEKLYLYYLQNGRDMYVDQELDINRLSDYDVDAIVPQSFLKDDSIDNKVLTRSDKNRGKSDNVPSEEVVKKMKNYWRQLLNAKLITQRKFDNLTKAERGGLSELDKAGFIKRQLVETRQITKHVAQILDSRMNTKYDENDKLIREVKVITLKSKLVSDFRKDFQFYKVREINNYHHAHDAYLNAVVGTALIKKYPKLESEFVYGDYKVYDVRKMIAKSEQEIGKATAKYFFYSNIMNFFKTEITLANGEIRKRPLIETNGETGEIVWDKGRDFATVRKVLSMPQVNIVKKTEVQTGGFSKESILPKRNSDKLIARKKDWDPKKYGGFVSPTVAYSVLVVAKVEKGKSKKLKSVKELLGITIMERSSFEKNPIDFLEAKGYKEVKKDLIIKLPKYSLFELENGRKRMLASAGELQKGNELALPSKYVNFLYLASHYEKLKGSPEDNEQKQLFVEQHKHYLDEIIEQISEFSKRVILADANLDKVLSAYNKHRDKPIREQAENIIHLFTLTNLGAPAAFKYFDTTIDRKQYRSTKEVLDATLIHQSITGLYETRIDLSQLGGD

SEQ ID NO: 30 - protein, 1368 aa, Synthetic construct
MDKKYSIGLAIGTNSVGWAVITDEYKVPSKKFKVLGNTDRHSIKKNLIGALLFDSGETAEATRLKRTARRRYTRRKNRICYLQEIFSNEMAKVDDSFFHRLEESFLVEEDKKHERHPIFGNIVDEVAYHEKYPTIYHLRKKLVDSTDKADLRLIYLALAHMIKFRGHFLIEGDLNPDNSDVDKLFIQLVQTYNQLFEENPINASGVDAKAILSARLSKSRRLENLIAQLPGEKKNGLFGNLIALSLGLTPNFKSNFDLAEDAKLQLSKDTYDDDLDNLLAQIGDQYADLFLAAKNLSDAILLSDILRVNTEITKAPLSASMIKRYDEHHQDLTLLKALVRQQLPEKYKEIFFDQSKNGYAGYIDGGASQEEFYKFIKPILEKMDGTEELLVKLNREDLLRKQRTFDNGSIPHQIHLGELHAILRRQEDFYPFLKDNREKIEKILTFRIPYYVGPLARGNSRFAWMTRKSEETITPWNFEEVVDKGASAQSFIERMTNFDKNLPNEKVLPKHSLLYEYFTVYNELTKVKYVTEGMRKPAFLSGEQKKAIVDLLFKTNRKVTVKQLKEDYFKKIECFDSVEISGVEDRFNASLGTYHDLLKIIKDKDFLDNEENEDILEDIVLTLTLFEDREMIEERLKTYAHLFDDKVMKQLKRRRYTGWGRLSRKLINGIRDKQSGKTILDFLKSDGFANRNFMQLIHDDSLTFKEDIQKAQVSGQGDSLHEHIANLAGSPAIKKGILQTVKVVDELVKVMGRHKPENIVIEMARENQTTQKGQKNSRERMKRIEEGIKELGSQILKEHPVENTQLQNEKLYLYYLQNGRDMYVDQELDINRLSDYDVDAIVPQSFLKDDSIDNKVLTRSDKNRGKSDNVPSEEVVKKMKNYWRQLLNAKLITQRKFDNLTKAERGGLSELDKAGFIKRQLVETRQITKHVAQILDSRMNTKYDENDKLIREVKVITLKSKLVSDFRKDFQFYKVREINNYHHAHDAYLNAVVGTALIKKYPKLESEFVYGDYKVYDVRKMIAKSEQEIGKATAKYFFYSNIMNFFKTEITLANGEIRKRPLIETNGETGEIVWDKGRDFATVRKVLSMPQVNIVKKTEVQTGGFSKESILPKRNSDKLIARKKDWDPKKYGGFLWPTVAYSVLVVAKVEKGKSKKLKSVKELLGITIMERSSFEKNPIDFLEAKGYKEVKKDLIIKLPKYSLFELENGRKRMLASAKQLQKGNELALPSKYVNFLYLASHYEKLKGSPEDNEQKQLFVEQHKHYLDEIIEQISEFSKRVILADANLDKVLSAYNKHRDKPIREQAENIIHLFTLTNLGAPAAFKYFDTTIDRKQYRSTKEVLDATLIHQSITGLYETRIDLSQLGGD

SEQ ID NO: 31 - protein, 1368 aa, Synthetic construct
MDKKYSIGLAIGTNSVGWAVITDEYKVPSKKFKVLGNTDRHSIKKNLIGALLFDSGETAERTRLKRTARRRYTRRKNRICYLQEIFSNEMAKVDDSFFHRLEESFLVEEDKKHERHPIFGNIVDEVAYHEKYPTIYHLRKKLVDSTDKADLRLIYLALAHMIKFRGHFLIEGDLNPDNSDVDKLFIQLVQTYNQLFEENPINASGVDAKAILSARLSKSRRLENLIAQLPGEKKNGLFGNLIALSLGLTPNFKSNFDLAEDAKLQLSKDTYDDDLDNLLAQIGDQYADLFLAAKNLSDAILLSDILRVNTEITKAPLSASMIKRYDEHHQDLTLLKALVRQQLPEKYKEIFFDQSKNGYAGYIDGGASQEEFYKFIKPILEKMDGTEELLVKLNREDLLRKQRTFDNGSIPHQIHLGELHAILRRQEDFYPFLKDNREKIEKILTFRIPYYVGPLARGNSRFAWMTRKSEETITPWNFEEVVDKGASAQSFIERMTNFDKNLPNEKVLPKHSLLYEYFTVYNELTKVKYVTEGMRKPAFLSGEQKKAIVDLLFKTNRKVTVKQLKEDYFKKIECFDSVEISGVEDRFNASLGTYHDLLKIIKDKDFLDNEENEDILEDIVLTLTLFEDREMIEERLKTYAHLFDDKVMKQLKRRRYTGWGRLSRKLINGIRDKQSGKTILDFLKSDGFANRNFMQLIHDDSLTFKEDIQKAQVSGQGDSLHEHIANLAGSPAIKKGILQTVKVVDELVKVMGRHKPENIVIEMARENQTTQKGQKNSRERMKRIEEGIKELGSQILKEHPVENTQLQNEKLYLYYLQNGRDMYVDQELDINRLSDYDVDAIVPQSFLKDDSIDNKVLTRSDKNRGKSDNVPSEEVVKKMKNYWRQLLNAKLITQRKFDNLTKAERGGLSELDKAGFIKRQLVETRQITKHVAQILDSRMNTKYDENDKLIREVKVITLKSKLVSDFRKDFQFYKVREINNYHHAHDAYLNAVVGTALIKKYPKLESEFVYGDYKVYDVRKMIAKSEQEIGKATAKYFFYSNIMNFFKTEITLANGEIRKRPLIETNGETGEIVWDKGRDFATVRKVLSMPQVNIVKKTEVQTGGFSKESIRPKRNSDKLIARKKDWDPKKYGGFLWPTVAYSVLVVAKVEKGKSKKLKSVKELLGITIMERSSFEKNPIDFLEAKGYKEVKKDLIIKLPKYSLFELENGRKRMLASAKQLQKGNELALPSKYVNFLYLASHYEKLKGSPEDNEQKQLFVEQHKHYLDEIIEQISEFSKRVILADANLDKVLSAYNKHRDKPIREQAENIIHLFTLTRLGAPRAFKYFDTTIDPKQYRSTKEVLDATLIHQSITGLYETRIDLSQLGGD

SEQ ID NO: 32 - protein, 1053 aa, Synthetic construct
MKRNYILGLAIGITSVGYGIIDYETRDVIDAGVRLFKEANVENNEGRRSKRGARRLKRRRRHRIQRVKKLLFDYNLLTDHSELSGINPYEARVKGLSQKLSEEEFSAALLHLAKRRGVHNVNEVEEDTGNELSTKEQISRNSKALEEKYVAELQLERLKKDGEVRGSINRFKTSDYVKEAKQLLKVQKAYHQLDQSFIDTYIDLLETRRTYYEGPGEGSPFGWKDIKEWYEMLMGHCTYFPEELRSVKYAYNADLYNALNDLNNLVITRDENEKLEYYEKFQIIENVFKQKKKPTLKQIAKEILVNEEDIKGYRVTSTGKPEFTNLKVYHDIKDITARKEIIENAELLDQIAKILTIYQSSEDIQEELTNLNSELTQEEIEQISNLKGYTGTHNLSLKAINLILDELWHTNDNQIAIFNRLKLVPKKVDLSQQKEIPTTLVDDFILSPVVKRSFIQSIKVINAIIKKYGLPNDIIIELAREKNSKDAQKMINEMQKRNRQTNERIEEIIRTTGKENAKYLIEKIKLHDMQEGKCLYSLEAIPLEDLLNNPFNYEVDHIIPRSVSFDNSFNNKVLVKQEEASKKGNRTPFQYLSSSDSKISYETFKKHILNLAKGKGRISKTKKEYLLEERDINRFSVQKDFINRNLVDTRYATRGLMNLLRSYFRVNNLDVKVKSINGGFTSFLRRKWKFKKERNKGYKHHAEDALIIANADFIFKEWKKLDKAKKVMENQMFEEKQAESMPEIETEQEYKEIFITPHQIKHIKDFKDYKYSHRVDKKPNRKLINDTLYSTRKDDKGNTLIVNNLNGLYDKDNDKLKKLINKSPEKLLMYHHDPQTYQKLKLIMEQYGDEKNPLYKYYEETGNYLTKYSKKDNGPVIKKIKYYGNKLNAHLDITDDYPNSRNKVVKLSLKPYRFDVYLDNGVYKFVTVKNLDVIKKENYYEVNSKCYEEAKKLKKISNQAEFIASFYKNDLIKINGELYRVIGVNNDLLNRIEVNMIDITYREYLENMNDKRPPHIIKTIASKTQSIKKYSTDILGNLYEVKSKKHPQIIKKG

SEQ ID NO: 33 - protein, 100 aa, Synthetic construct
MNNSQGRVTFEDVTVNFTQGEWQRLNPEQRNLYRDVMLENYSNLVSVGQGETTKPDVILRLEQGKEPWLEEEEVLGSGRAEKNGDIGGQIWKPKDVKESL

SEQ ID NO: 34 - protein, 106 aa, Synthetic construct
MAATLLMAGSQAPVTFEDMAMYLTREEWRPLDAAQRDLYRDVMQENYGNVVSLDFEIRSENEVNPKQEISEDVQFGTTSERPAENAEENPESEEGFESGDRSERQW

SEQ ID NO: 35 - protein, 95 aa, Synthetic construct
MLENYRNLVFLGIAVSKPDLITCLEQGKEPCNMKRHEMVAKPPVMCSHIAEDLCPERDIKYFFQKVILRRYDKCEHENLQLRKGCKSVDECKVCK

SEQ ID NO: 36 - protein, 95 aa, Synthetic construct
MGLLTFRDVAIEFSLEEWQCLDTAQRNLYKNVILENYRNLVFLGIAVSKQDLITCLEQEKEPLTVKRHEMVNEPPVMCSHFAQEFWPEQNIKDSF

SEQ ID NO: 37 - protein, 116 aa, Synthetic construct
MLQMQNSEHHGQSIKTQTDSISLEDVAVNFTLEEWALLDPGQRNIYRDVMRATFKNLACIGEKWKDQDIEDEHKNQGRNLRSPMVEALCENKEDCPCGKSTSQIPDLNTNLETPTG

SEQ ID NO: 38 - protein, 100 aa, Synthetic construct
MALSQGLLTFRDVAIEFSQEEWKCLDPAQRTLYRDVMLENYRNLVSLDISSKCMMNTLSSTGQGNTEVIHTGTLQRQASYHIGAFCSQEIEKDIHDFVFQ

SEQ ID NO: 39 - protein, 98 aa, Synthetic construct
MAQGLVTFADVAIDFSQEEWACLNSAQRDLYWDVMLENYSNLVSLDLESAYENKSLPTKKNIHEIRASKRNSDRRSKSLGRNWICEGTLERPQRSRGR

SEQ ID NO: 40 - protein, 118 aa, Synthetic construct
MLREEATKKSKEKEPGMALPQGRLTFRDVAIEFSLEEWKCLNPAQRALYRAVMLENYRNLEFVDSSLKSMMEFSSTRHSITGEVIHTGTLQRHKSHHIGDFCFPEMKKDIHHFEFQWQ

SEQ ID NO: 41 - protein, 104 aa, Synthetic construct
MPGPPGSLEMGPLTFRDVAIEFSLEEWQCLDTAQRNLYRKVMFENYRNLVFLGIAVSKPHLITCLEQGKEPWNRKRQEMVAKPPVIYSHFTEDLWPEHSIKDSF

SEQ ID NO: 42 - protein, 113 aa, Synthetic construct
MSPPWSPALAAEGRGSSCEASVSFEDVTVDFSKEEWQHLDPAQRRLYWDVTLENYSHLLSVGYQIPKSEAAFKLEQGEGPWMLEGEAPHQSCSGEAIGKMQQQGIPGGIFFHC

SEQ ID NO: 43 - protein, 109 aa, Synthetic construct
MASPSPPPESKEEWDYLDPAQRSLYKDVMMENYGNLVSLDVLNRDKDEEPTVKQEIEEIEEEVEPQGVIVTRIKSEIDQDPMGRETFELVGRLDKQRGIFLWEIPRESL

SEQ ID NO: 44 - protein, 99 aa, Synthetic construct
MALTQGPLKFMDVAIEFSQEEWKCLDPAQRTLYRDVMLENYRNLVSLGICLPDLSVTSMLEQKRDPWTLQSEEKIANDPDGRECIKGVNTERSSKLGSN

SEQ ID NO: 45 - protein, 100 aa, Synthetic construct
MAASAQVSVTFEDVAVTFTQEEWGQLDAAQRTLYQEVMLETCGLLMSLGCPLFKPELIYQLDHRQELWMATKDLSQSSYPGDNTKPKTTEPTFSHLALPE

SEQ ID NO: 46 - protein, 144 aa, Synthetic construct
MFSQEERMAAGYLPRWSQELVTFEDVSMDFSQEEWELLEPAQKNLYREVMLENYRNVVSLEALKNQCTDVGIKEGPLSPAQTSQVTSLSSWTGYLLFQPVASSHLEQREALWIEEKGTPQASCSDWMTVLRNQDSTYKKVALQE

SEQ ID NO: 47 - protein, 97 aa, Synthetic construct
MSQGSVTFRDVAIDFSQEEWKWLQPAQRDLYRCVMLENYGHLVSLGLSISKPDVVSLLEQGKEPWLGKREVKRDLFSVSESSGEIKDFSPKNVIYDD

SEQ ID NO: 48 - protein, 112 aa, Synthetic construct
MEEAQKRKAKESGMALPQGRLTFMDVAIEFSQEEWKSLDPGQRALYRDVMLENYRNLVFLGRSCVLGSNAENKPIKNQLGLTLESHLSELQLFQAGRKIYRSNQVEKFTNHR

SEQ ID NO: 49 - protein, 105 aa, Synthetic construct
MAAAVLTDRAQVSVTFDDVAVTFTKEEWGQLDLAQRTLYQEVMLENCGLLVSLGCPVPKAELICHLEHGQEPWTRKEDLSQDTCPGDKGKPKTTEPTTCEPALSE

SEQ ID NO: 50 - protein, 99 aa, Synthetic construct
MIQAQESITLEDVAVDFTWEEWQLLGAAQKDLYRDVMLENYSNLVAVGYQASKPDALFKLEQGEQLWTIEDGIHSGACSDIWKVDHVLERLQSESLVNR

SEQ ID NO: 51 - protein, 112 aa, Synthetic construct
MEGVAGVMSVGPPAARLQEPVTFRDVAVDFTQEEWGQLDPTQRILYRDVMLETFGHLLSIGPELPKPEVISQLEQGTELWVAERGTTQGCHPAWEPRSESQASRKEEGLPEE

SEQ ID NO: 52 - protein, 97 aa, Synthetic construct
MSLGSELFRDVAIVFSQEEWQWLAPAQRDLYRDVMLETYSNLVSLGLAVSKPDVISFLEQGKEPWMVERVVSGGLCPVLESRYDTKELFPKQHVYEV

SEQ ID NO: 53 - protein, 105 aa, Synthetic construct
MAHKYVGLQYHGSVTFEDVAIAFSQQEWESLDSSQRGLYRDVMLENYRNLVSMAGHSRSKPHVIALLEQWKEPEVTVRKDGRRWCTDLQLEDDTIGCKEMPTSEN

SEQ ID NO: 54 - protein, 92 aa, Synthetic construct
MAFEDVAVYFSQEEWGLLDTAQRALYRRVMLDNFALVASLGLSTSRPRVVIQLERGEEPWVPSGTDTTLSRTTYRRRNPGSWSLTEDRDVSG

SEQ ID NO: 55 - protein, 104 aa, Synthetic construct
MLENYRNLVFVGIAASKPDLITCLEQGKEPWNVKRHEMVTEPPVVYSYFAQDLWPKQGKKNYFQKVILRTYKKCGRENLQLRKYCKSMDECKVHKECYNGLNQC

SEQ ID NO: 56 - protein, 127 aa, Synthetic construct
MHFRRPDPCREPLASPIQDSVAFEDVAVNFTQEEWALLDSSQKNLYREVMQETCRNLASVGSQWKDQNIEDHFEKPGKDIRNHIVQRLCESKEDGQYGEVVSQIPNLDLNENISTGLKPCECSICGK

SEQ ID NO: 57 - protein, 110 aa, Synthetic construct
MALSQGLFTFKDVAIEFSQEEWECLDPAQRALYRDVMLENYRNLLSLDEDNIPPEDDISVGFTSKGLSPKENNKEELYHLVILERKESHGINNFDLKEVWENMPKFDSLW

SEQ ID NO: 58 - protein, 98 aa, Synthetic construct
MTFEDIIVDFTQEEWALLDTSQRKLFQDVMLENISHLVSIGKQLCKSVVLSQLEQVEKLSTQRISLLQGREVGIKHQEIPFIHHIYQKGTSTISTMRS

SEQ ID NO: 59 - protein, 103 aa, Synthetic construct
MAVTFEDVTIIFTWEEWKFLDSSQKRLYREVMWENYTNVMSVENWNESYKSQEEKFRYLEYENFSYWQGWWNAGAQMYENQNYGETVQGTDSKDLTQQDRSQC

SEQ ID NO: 60 - protein, 99 aa, Synthetic construct
MITSQGSVSFRDVTVGFTQEEWQHLDPAQRTLYRDVMLENYSHLVSVGYCIPKPEVILKLEKGEEPWILEEKFPSQSHLELINTSRNYSIMKFNEFNKG

SEQ ID NO: 61 - protein, 114 aa, Synthetic construct
MFEDVAVYLSREEWGRLGPAQRGLYRDVMLETYGNLVSLGVGPAGPKPGVISQLERGDEPWVLDVQGTSGKEHLRVNSPALGTRTEYKELTSQETFGEEDPQGSEPVEACDHIS

SEQ ID NO: 62 - protein, 112 aa, Synthetic construct
METYGNVVSLGLPGSKPDIISQLERGEDPWVLDRKGAKKSQGLWSDYSDNLKYDHTTACTQQDSLSCPWECETKGESQNTDLSPKPLISEQTVILGKTPLGRIDQENNETKQ

SEQ ID NO: 63 - protein, 102 aa, Synthetic construct
MAEMNPAQGHVVFEDVAIYFSQEEWGHLDEAQRLLYRDVMLENLALLSSLGCCHGAEDEEAPLEPGVSVGVSQVMAPKPCLSTQNTQPCETCSSLLKDILRL

SEQ ID NO: 64 - protein, 62 aa, Synthetic construct
MLDNYRNLVFLGIAVSKPDLITCLEQGKEPCNMKRHAMVAKPPVVCSHFAQDLWPKQGLKDS

SEQ ID NO: 65 - protein, 105 aa, Synthetic construct
MAAGQREARPQVSLTFEDVAVLFTRDEWRKLAPSQRNLYRDVMLENYRNLVSLGLPFTKPKVISLLQQGEDPWEVEKDGSGVSSLGSKSSHKTTKSTQTQDSSFQ

SEQ ID NO: 66 - protein, 97 aa, Synthetic construct
MALRSVMFSDVSIDFSPEEWEYLDLEQKDLYRDVMLENYSNLVSLGCFISKPDVISSLEQGKEPWKVVRKGRRQYPDLETKYETKKLSLENDIYEIN

SEQ ID NO: 67 - protein, 98 aa, Synthetic construct
MTTFKEAMTFKDVAVVFTEEELGLLDLAQRKLYRDVMLENFRNLLSVGHQAFHRDTFHFLREEKIWMMKTAIQREGNSGDKIQTEMETVSEAGTHQEW

SEQ ID NO: 68 - protein, 103 aa, Synthetic construct
MFQVEQKSQESVSFKDVTVGFTQEEWQHLDPSQRALYRDVMLENYSNLVSVGYCVHKPEVIFRLQQGEEPWKQEEEFPSQSFPEVWTADHLKERSQENQSKHL

SEQ ID NO: 69 - protein, 98 aa, Synthetic construct
MTKSKEAVTFKDVAVVFSEEELQLLDLAQRKLYRDVMLENFRNVVSVGHQSTPDGLPQLEREEKLWMMKMATQRDNSSGAKNLKEMETLQEVGLRYLP

SEQ ID NO: 70 - protein, 112 aa, Synthetic construct
MSQKPQVLGPEKQDGSCEASVSFEDVTVDFSREEWQQLDPAQRCLYRDVMLELYSHLFAVGYHIPNPEVIFRMLKEKEPRVEEAEVSHQRCQEREFGLEIPQKEISKKASFQ

SEQ ID NO: 71 - protein, 95 aa, Synthetic construct
MELVTFRDVAIEFSPEEWKCLDPAQQNLYRDVMLENYRNLVSLGFVISNPDLVTCLEQIKEPCNLKIHETAAKPPAICSPFSQDLSPVQGIEDSF

SEQ ID NO: 72 - protein, 112 aa, Synthetic construct
MSTLLQGGHNLLSSASFQESVTFKDVIVDFTQEEWKQLDPGQRDLFRDVTLENYTHLVSIGLQVSKPDVISQLEQGTEPWIMEPSIPVGTCADWETRLENSVSAPEPDISEE

SEQ ID NO: 73 - protein, 112 aa, Synthetic construct
MDPAQVPVAADLLTDHEEGYVTFEDVAVYFSQEEWRLLDDAQRLLYRNVMLENFTLLASLGLASSKTHEITQLESWEEPFMPAWEVVTSAIPRGCWHGAEAEEAPEQIASVG

SEQ ID NO: 74 - protein, 112 aa, Synthetic construct
MKKLEAVGTGIEPKAMSQGLVTFGDVAVDFSQEEWEWLNPIQRNLYRKVMLENYRNLASLGLCVSKPDVISSLEQGKEPWTVKRKMTRAWCPDLKAVWKIKELPLKKDFCEG

SEQ ID NO: 75 - protein, 108 aa, Synthetic construct
MSLLGEHWDYDALFETQPGLVTIKNLAVDFRQQLHPAQKNFCKNGIWENNSDLGSAGHCVAKPDLVSLLEQEKEPWMVKRELTGSLFSGQRSVHETQELFPKQDSYAE

SEQ ID NO: 76 - protein, 113 aa, Synthetic construct
MLALAASQPARLEERLIRDRDLGASLLPAAPQEQWRQLDSTQKEQYWDLILETYGKMVSGAGISHPKSDLTNSIEFGEELAGIYLHVNEKIPRPTCIGDRQENDKENLNLENH

SEQ ID NO: 77 - protein, 131 aa, Synthetic construct
MEGRPGETTDTCFVSGVHGPVALGDIPFYFSREEWGTLDPAQRDLFWDIKRENSRNTTLGFGLKGQSEKSLLQEMVPVVPGQTGSDVTVSWSPEEAEAWESENRPRAALGPVVGARRGRPPTRRRQFRDLA

SEQ ID NO: 78 - protein, 116 aa, Synthetic construct
MVAVVRALQRALDGTSSQGMVTFEDTAVSLTWEEWERLDPARRDFCRESAQKDSGSTVPPSLESRVENKELIPMQQILEEAEPQGQLQEAFQGKRPLFSKCGSTHEDRVEKQSGDP

SEQ ID NO: 79 - protein, 113 aa, Synthetic construct
MNKSQGSVSFTDVTVDFTQEEWEQLDPSQRILYMDVMLENYSNLLSVEVWKADDQMERDHRNPDEQARQFLILKNQTPIEERGDLFGKALNLNTDFVSLRQVPYKYDLYEKTL

SEQ ID NO: 80 - protein, 108 aa, Synthetic construct
MAHGSVTFRDVAIDFSQEEWEFLDPAQRDLYRDVMWENYSNFISLGPSISKPDVITLLDEERKEPGMVVREGTRRYCPDLESRYRTNTLSPEKDIYEIYSFQWDIMER

SEQ ID NO: 81 - protein, 141 aa, Synthetic construct
MAAAVLRDSTSVPVTAEAKLMGFTQGCVTFEDVAIYFSQEEWGLLDEAQRLLYRDVMLENFALITALVCWHGMEDEETPEQSVSVEGVPQVRTPEASPSTQKIQSCDMCVPFLTDILHLTDLPGQELYLTGACAVFHQDQK

SEQ ID NO: 82 - protein, 133 aa, Synthetic construct
MLPPTAASQREGHTEGGELVNELLKSWLKGLVTFEDVAVEFTQEEWALLDPAQRTLYRDVMLENCRNLASLGNQVDKPRLISQLEQEDKVMTEERGILSGTCPDVENPFKAKGLTPKLHVFRKEQSRNMKMER

SEQ ID NO: 83 - protein, 107 aa, Synthetic construct
MAQESVMFSDVSVDFSQEEWECLNDDQRDLYRDVMLENYSNLVSMGHSISKPNVISYLEQGKEPWLADRELTRGQWPVLESRCETKKLFLKKEIYEIESTQWEIMEK

SEQ ID NO: 84 - protein, 114 aa, Synthetic construct
MPGAPGSLEMGPLTFRDVTIEFSLEEWQCLDTVQQNLYRDVMLENYRNLVFLGMAVFKPDLITCLKQGKEPWNMKRHEMVTKPPVMRSHFTQDLWPDQSTKDSFQEVILRTYAR

SEQ ID NO: 85 - protein, 95 aa, Synthetic construct
MAGSQFPDFKHLGTFLVFEELVTFEDVLVDFSPEELSSLSAAQRNLYREVMLENYRNLVSLGHQFSKPDIISRLEEEESYAMETDSRHTVICQGE

SEQ ID NO: 86 - protein, 78 aa, Synthetic construct
MPGPPRSLEMGLLTFRDVAIEFSLEEWQHLDIAQQNLYRNVMLENYRNLAFLGIAVSKPDLITCLEQGKEPWNMKRHE

SEQ ID NO: 87 - protein, 93 aa, Synthetic construct
MAPPLAPLPPRDPNGAGPEWREPGAVSFADVAVYFCREEWGCLRPAQRALYRDVMRETYGHLSALGIGGNKPALISWVEEEAELWGPAAQDPE

SEQ ID NO: 88 - protein, 100 aa, Synthetic construct
MGPPLAPRPAHVPGEAGPRRTRESRPGAVSFADVAVYFSPEEWECLRPAQRALYRDVMRETFGHLGALGFSVPKPAFISWVEGEVEAWSPEAQDPDGESS

SEQ ID NO: 89 - protein, 573 aa, Synthetic construct
MDAKSLTAWSRTLVTFKDVFVDFTREEWKLLDTAQQIVYRNVMLENYKNLVSLGYQLTKPDVILRLEKGEEPWLVEREIHQETHPDSETAFEIKSSVSSRSIFKDKQSCDIKMEGMARNDLWYLSLEEVWKCRDQLDKYQENPERHLRQVAFTQKKVLTQERVSESGKYGGNCLLPAQLVLREYFHKRDSHTKSLKHDLVLNGHQDSCASNSNECGQTFCQNIHLIQFARTHTGDKSYKCPDNDNSLTHGSSLGISKGIHREKPYECKECGKFFSWRSNLTRHQLIHTGEKPYECKECGKSFSRSSHLIGHQKTHTGEEPYECKECGKSFSWFSHLVTHQRTHTGDKLYTCNQCGKSFVHSSRLIRHQRTHTGEKPYECPECGKSFRQSTHLILHQRTHVRVRPYECNECGKSYSQRSHLVVHHRIHTGLKPFECKDCGKCFSRSSHLYSHQRTHTGEKPYECHDCGKSFSQSSALIVHQRIHTGEKPYECCQCGKAFIRKNDLIKHQRIHVGEETYKCNQCGIIFSQNSPFIVHQIAHTGEQFLTCNQCGTALVNTSNLIGYQTNHIRENAY

SEQ ID NO: 90 - protein, 191 aa, Synthetic construct
MGKKTKRTADSSSSEDEEEYVVEKVLDRRVVKGQVEYLLKWKGFSEEHNTWEPEKNLDCPELISEFMKKYKKMKEGENNKPREKSESNKRKSNFSNSADDIKSKKKREQSNDIARGFERGLEPEKIIGATDSCGDLMFLMKWKDTDEADLVLAKEANVKCPQIVIAFYEERLTWHAYPEDAENKEKETAKS

SEQ ID NO: 91 - protein, 228 aa, Synthetic construct
MTMGDKKSPTRPKRQAKPAADEGFWDCSVCTFRNSAEAFKCSICDVRKGTSTRKPRINSQLVAQQVAQQYATPPPPKKEKKEKVEKQDKEKPEKDKEISPSVTKKNTNKKTKPKSDILKDPPSEANSIQSANATTKTSETNHTSRPRLKNVDRSTAQQLAVTVGNVTVIITDFKEKTRSSSTSSSTVTSSAGSEQQNQSSSGSESTDKGSSRSSTPKGDMSAVNDESF

SEQ ID NO: 92 - protein, 180 aa, Synthetic construct
MGDKKSPTRPKRQPKPSSDEGYWDCSVCTFRNSAEAFKCMMCDVRKGTSTRKPRPVSQLVAQQVTQQFVPPTQSKKEKKDKVEKEKSEKETTSKKNSHKKTRPRLKNVDRSSAQHLEVTVGDLTVIITDFKEKTKSPPASSAASADQHSQSGSSSDNTERGMSRSSSPRGEASSLNGESH

SEQ ID NO: 93 - protein, 3065 aa, Synthetic construct
MEEKQQIILANQDGGTVAGAAPTFFVILKQPGNGKTDQGILVTNQDACALASSVSSPVKSKGKICLPADCTVGGITVTLDNNSMWNEFYHRSTEMILTKQGRRMFPYCRYWITGLDSNLKYILVMDISPVDNHRYKWNGRWWEPSGKAEPHVLGRVFIHPESPSTGHYWMHQPVSFYKLKLTNNTLDQEGHIILHSMHRYLPRLHLVPAEKAVEVIQLNGPGVHTFTFPQTEFFAVTAYQNIQITQLKIDYNPFAKGFRDDGLNNKPQRDGKQKNSSDQEGNNISSSSGHRVRLTEGQGSEIQPGDLDPLSRGHETSGKGLEKTSLNIKRDFLGFMDTDSALSEVPQLKQEISECLIASSFEDDSRVASPLDQNGSFNVVIKEEPLDDYDYELGECPEGVTVKQEETDEETDVYSNSDDDPILEKQLKRHNKVDNPEADHLSSKWLPSSPSGVAKAKMFKLDTGKMPVVYLEPCAVTRSTVKISELPDNMLSTSRKDKSSMLAELEYLPTYIENSNETAFCLGKESENGLRKHSPDLRVVQKYPLLKEPQWKYPDISDSISTERILDDSKDSVGDSLSGKEDLGRKRTTMLKIATAAKVVNANQNASPNVPGKRGRPRKLKLCKAGRPPKNTGKSLISTKNTPVSPGSTFPDVKPDLEDVDGVLFVSFESKEALDIHAVDGTTEESSSLQASTTNDSGYRARISQLEKELIEDLKTLRHKQVIHPGLQEVGLKLNSVDPTMSIDLKYLGVQLPLAPATSFPFWNLTGTNPASPDAGFPFVSRTGKTNDFTKIKGWRGKFHSASASRNEGGNSESSLKNRSAFCSDKLDEYLENEGKLMETSMGFSSNAPTSPVVYQLPTKSTSYVRTLDSVLKKQSTISPSTSYSLKPHSVPPVSRKAKSQNRQATFSGRTKSSYKSILPYPVSPKQKYSHVILGDKVTKNSSGIISENQANNFVVPTLDENIFPKQISLRQAQQQQQQQQGSRPPGLSKSQVKLMDLEDCALWEGKPRTYITEERADVSLTTLLTAQASLKTKPIHTIIRKRAPPCNNDFCRLGCVCSSLALEKRQPAHCRRPDCMFGCTCLKRKVVLVKGGSKTKHFQRKAAHRDPVFYDTLGEEAREEEEGIREEEEQLKEKKKRKKLEYTICETEPEQPVRHYPLWVKVEGEVDPEPVYIPTPSVIEPMKPLLLPQPEVLSPTVKGKLLTGIKSPRSYTPKPNPVIREEDKDPVYLYFESMMTCARVRVYERKKEDQRQPSSSSSPSPSFQQQTSCHSSPENHNNAKEPDSEQQPLKQLTCDLEDDSDKLQEKSWKSSCNEGESSSTSYMHQRSPGGPTKLIEIISDCNWEEDRNKILSILSQHINSNMPQSLKVGSFIIELASQRKSRGEKNPPVYSSRVKISMPSCQDQDDMAEKSGSETPDGPLSPGKMEDISPVQTDALDSVRERLHGGKGLPFYAGLSPAGKLVAYKRKPSSSTSGLIQVASNAKVAASRKPRTLLPSTSNSKMASSSGTATNRPGKNLKAFVPAKRPIAARPSPGGVFTQFVMSKVGALQQKIPGVSTPQTLAGTQKFSIRPSPVMVVTPVVSSEPVQVCSPVTAAVTTTTPQVFLENTTAVTPMTAISDVETKETTYSSGATTTGVVEVSETNTSTSVTSTQSTATVNLTKTTGITTPVASVAFPKSLVASPSTITLPVASTASTSLVVVTAAASSSMVTTPTSSLGSVPIILSGINGSPPVSQRPENAAQIPVATPQVSPNTVKRAGPRLLLIPVQQGSPTLRPVSNTQLQGHRMVLQPVRSPSGMNLFRHPNGQIVQLLPLHQLRGSNTQPNLQPVMFRNPGSVMGIRLPAPSKPSETPPSSTSSSAFSVMNPVIQAVGSSSAVNVITQAPSLLSSGASFVSQAGTLTLRISPPEPQSFASKTGSETKITYSSGGQPVGTASLIPLQSGSFALLQLPGQKPVPSSILQHVASLQMKRESQNPDQKDETNSIKREQETKKVLQSEGEAVDPEANVIKQNSGAATSEETLNDSLEDRGDHLDEECLPEEGCATVKPSEHSCITGSHTDQDYKDVNEEYGARNRKSSKEKVAVLEVRTISEKASNKTVQNLSKVQHQKLGDVKVEQQKGFDNPEENSSEFPVTFKEESKFELSGSKVMEQQSNLQPEAKEKECGDSLEKDRERWRKHLKGPLTRKCVGASQECKKEADEQLIKETKTCQENSDVFQQEQGISDLLGKSGITEDARVLKTECDSWSRISNPSAFSIVPRRAAKSSRGNGHFQGHLLLPGEQIQPKQEKKGGRSSADFTVLDLEEDDEDDNEKTDDSIDEIVDVVSDYQSEEVDDVEKNNCVEYIEDDEEHVDIETVEELSEEINVAHLKTTAAHTQSFKQPSCTHISADEKAAERSRKAPPIPLKLKPDYWSDKLQKEAEAFAYYRRTHTANERRRRGEMRDLFEKLKITLGLLHSSKVSKSLILTRAFSEIQGLTDQADKLIGQKNLLTRKRNILIRKVSSLSGKTEEVVLKKLEYIYAKQQALEAQKRKKKMGSDEFDISPRISKQQEGSSASSVDLGQMFINNRRGKPLILSRKKDQATENTSPLNTPHTSANLVMTPQGQLLTLKGPLFSGPVVAVSPDLLESDLKPQVAGSAVALPENDDLFMMPRIVNVTSLATEGGLVDMGGSKYPHEVPDSKPSDHLKDTVRNEDNSLEDKGRISSRGNRDGRVTLGPTQVFLANKDSGYPQIVDVSNMQKAQEFLPKKISGDMRGIQYKWKESESRGERVKSKDSSFHKLKMKDLKDSSIEMELRKVTSAIEEAALDSSELLTNMEDEDDTDETLTSLLNEIAFLNQQLNDDSVGLAELPSSMDTEFPGDARRAFISKVPPGSRATFQVEHLGTGLKELPDVQGESDSISPLLLHLEDDDFSENEKQLAEPASEPDVLKIVIDSEIKDSLLSNKKAIDGGKNTSGLPAEPESVSSPPTLHMKTGLENSNSTDTLWRPMPKLAPLGLKVANPSSDADGQSLKVMPCLAPIAAKVGSVGHKMNLTGNDQEGRESKVMPTLAPVVAKLGNSGASPSSAGK

SEQ ID NO: 94 - protein, 185 aa, Synthetic construct
MGKKQNKKKVEEVLEEEEEEYVVEKVLDRRVVKGKVEYLLKWKGFSDEDNTWEPEENLDCPDLIAEFLQSQKTAHETDKSEGGKRKADSDSEDKGEESKPKKKKEESEKPRGFARGLEPERIIGATDSSGELMFLMKWKNSDEADLVPAKEANVKCPQVVISFYEERLTWHSYPSEDDDKKDDKN

SEQ ID NO: 95 - protein, 660 aa, Synthetic construct
MLVCYSVLACEILWDLPCSIMGSPLGHFTWDKYLKETCSVPAPVHCFKQSYTPPSNEFKISMKLEAQDPRNTTSTCIATVVGLTGARLRLRLDGSDNKNDFWRLVDSAEIQPIGNCEKNGGMLQPPLGFRLNASSWPMFLLKTLNGAEMAPIRIFHKEPPSPSHNFFKMGMKLEAVDRKNPHFICPATIGEVRGSEVLVTFDGWRGAFDYWCRFDSRDIFPVGWCSLTGDNLQPPGTKVVIPKNPYPASDVNTEKPSIHSSTKTVLEHQPGQRGRKPGKKRGRTPKTLISHPISAPSKTAEPLKFPKKRGPKPGSKRKPRTLLNPPPASPTTSTPEPDTSTVPQDAATIPSSAMQAPTVCIYLNKNGSTGPHLDKKKVQQLPDHFGPARASVVLQQAVQACIDCAYHQKTVFSFLKQGHGGEVISAVFDREQHTLNLPAVNSITYVLRFLEKLCHNLRSDNLFGNQPFTQTHLSLTAIEYSHSHDRYLPGETFVLGNSLARSLEPHSDSMDSASNPTNLVSTSQRHRPLLSSCGLPPSTASAVRRLCSRGVLKGSNERRDMESFWKLNRSPGSDRYLESRDASRLSGRDPSSWTVEDVMQFVREADPQLGPHADLFRKHEIDGKALLLLRSDMMMKYMGLKLGPALKLSYHIDRLKQGKF

SEQ ID NO: 96 - protein, 860 aa, Synthetic construct
MEQVAEGARVTAVPVSAADSTEELAEVEEGVGVVGEDNDAAARGAEAFGDSEEDGEDVFEVEKILDMKTEGGKVLYKVRWKGYTSDDDTWEPEIHLEDCKEVLLEFRKKIAENKAKAVRKDIQRLSLNNDIFEANSDSDQQSETKEDTSPKKKKKKLRQREEKSPDDLKKKKAKAGKLKDKSKPDLESSLESLVFDLRTKKRISEAKEELKESKKPKKDEVKETKELKKVKKGEIRDLKTKTREDPKENRKTKKEKFVESQVESESSVLNDSPFPEDDSEGLHSDSREEKQNTKSARERAGQDMGLEHGFEKPLDSAMSAEEDTDVRGRRKKKTPRKAEDTRENRKLENKNAFLEKKTVPKKQRNQDRSKSAAELEKLMPVSAQTPKGRRLSGEERGLWSTDSAEEDKETKRNESKEKYQKRHDSDKEEKGRKEPKGLKTLKEIRNAFDLFKLTPEEKNDVSENNRKREEIPLDFKTIDDHKTKENKQSLKERRNTRDETDTWAYIAAEGDQEVLDSVCQADENSDGRQQILSLGMDLQLEWMKLEDFQKHLDGKDENFAATDAIPSNVLRDAVKNGDYITVKVALNSNEEYNLDQEDSSGMTLVMLAAAGGQDDLLRLLITKGAKVNGRQKNGTTALIHAAEKNFLTTVAILLEAGAFVNVQQSNGETALMKACKRGNSDIVRLVIECGADCNILSKHQNSALHFAKQSNNVLVYDLLKNHLETLSRVAEETIKDYFEARLALLEPVFPIACHRLCEGPDFSTDFNYKPPQNIPEGSGILLFIFHANFLGKEVIARLCGPCSVQAVVLNDKFQLPVFLDSHFVYSFSPVAGPNKLFIRLTEAPSAKVKLLIGAYRVQLQ

SEQ ID NO: 97 - protein, 103 aa, Synthetic construct
MSEEKPKEGVKTENDHINLKVAGQDGSVVQFKIKRHTPLSKLMKAYCERQGLSMRQIRFRFDGQPINETDTPAQLEMEDEDTIDVFQQQTGGVPESSLAGHSF

SEQ ID NO: 98 - protein, 4834 aa, Synthetic construct
MPSESFCLAAQARLDSKWLKTDIQLAFTRDGLCGLWNEMVKDGEIVYTGTESTQNGELPPRKDDSVEPSGTKKEDLNDKEKKDEEETPAPIYRAKSILDSWVWGKQPDVNELKECLSVLVKEQQALAVQSATTTLSALRLKQRLVILERYFIALNRTVFQENVKVKWKSSGISLPPVDKKSSRPAGKGVEGLARVGSRAALSFAFAFLRRAWRSGEDADLCSELLQESLDALRALPEASLFDESTVSSVWLEVVERATRFLRSVVTGDVHGTPATKGPGSIPLQDQHLALAILLELAVQRGTLSQMLSAILLLLQLWDSGAQETDNERSAQGTSAPLLPLLQRFQSIICRKDAPHSEGDMHLLSGPLSPNESFLRYLTLPQDNELAIDLRQTAVVVMAHLDRLATPCMPPLCSSPTSHKGSLQEVIGWGLIGWKYYANVIGPIQCEGLANLGVTQIACAEKRFLILSRNGRVYTQAYNSDTLAPQLVQGLASRNIVKIAAHSDGHHYLALAATGEVYSWGCGDGGRLGHGDTVPLEEPKVISAFSGKQAGKHVVHIACGSTYSAAITAEGELYTWGRGNYGRLGHGSSEDEAIPMLVAGLKGLKVIDVACGSGDAQTLAVTENGQVWSWGDGDYGKLGRGGSDGCKTPKLIEKLQDLDVVKVRCGSQFSIALTKDGQVYSWGKGDNQRLGHGTEEHVRYPKLLEGLQGKKVIDVAAGSTHCLALTEDSEVHSWGSNDQCQHFDTLRVTKPEPAALPGLDTKHIVGIACGPAQSFAWSSCSEWSIGLRVPFVVDICSMTFEQLDLLLRQVSEGMDGSADWPPPQEKECVAVATLNLLRLQLHAAISHQVDPEFLGLGLGSILLNSLKQTVVTLASSAGVLSTVQSAAQAVLQSGWSVLLPTAEERARALSALLPCAVSGNEVNISPGRRFMIDLLVGSLMADGGLESALHAAITAEIQDIEAKKEAQKEKEIDEQEANASTFHRSRTPLDKDLINTGICESSGKQCLPLVQLIQQLLRNIASQTVARLKDVARRISSCLDFEQHSRERSASLDLLLRFQRLLISKLYPGESIGQTSDISSPELMGVGSLLKKYTALLCTHIGDILPVAASIASTSWRHFAEVAYIVEGDFTGVLLPELVVSIVLLLSKNAGLMQEAGAVPLLGGLLEHLDRFNHLAPGKERDDHEELAWPGIMESFFTGQNCRNNEEVTLIRKADLENHNKDGGFWTVIDGKVYDIKDFQTQSLTGNSILAQFAGEDPVVALEAALQFEDTRESMHAFCVGQYLEPDQEIVTIPDLGSLSSPLIDTERNLGLLLGLHASYLAMSTPLSPVEIECAKWLQSSIFSGGLQTSQIHYSYNEEKDEDHCSSPGGTPASKSRLCSHRRALGDHSQAFLQAIADNNIQDHNVKDFLCQIERYCRQCHLTTPIMFPPEHPVEEVGRLLLCCLLKHEDLGHVALSLVHAGALGIEQVKHRTLPKSVVDVCRVVYQAKCSLIKTHQEQGRSYKEVCAPVIERLRFLFNELRPAVCNDLSIMSKFKLLSSLPRWRRIAQKIIRERRKKRVPKKPESTDDEEKIGNEESDLEEACILPHSPINVDKRPIAIKSPKDKWQPLLSTVTGVHKYKWLKQNVQGLYPQSPLLSTIAEFALKEEPVDVEKMRKCLLKQLERAEVRLEGIDTILKLASKNFLLPSVQYAMFCGWQRLIPEGIDIGEPLTDCLKDVDLIPPFNRMLLEVTFGKLYAWAVQNIRNVLMDASAKFKELGIQPVPLQTITNENPSGPSLGTIPQARFLLVMLSMLTLQHGANNLDLLLNSGMLALTQTALRLIGPSCDNVEEDMNASAQGASATVLEETRKETAPVQLPVSGPELAAMMKIGTRVMRGVDWKWGDQDGPPPGLGRVIGELGEDGWIRVQWDTGSTNSYRMGKEGKYDLKLAELPAAAQPSAEDSDTEDDSEAEQTERNIHPTAMMFTSTINLLQTLCLSAGVHAEIMQSEATKTLCGLLRMLVESGTTDKTSSPNRLVYREQHRSWCTLGFVRSIALTPQVCGALSSPQWITLLMKVVEGHAPFTATSLQRQILAVHLLQAVLPSWDKTERARDMKCLVEKLFDFLGSLLTTCSSDVPLLRESTLRRRRVRPQASLTATHSSTLAEEVVALLRTLHSLTQWNGLINKYINSQLRSITHSFVGRPSEGAQLEDYFPDSENPEVGGLMAVLAVIGGIDGRLRLGGQVMHDEFGEGTVTRITPKGKITVQFSDMRTCRVCPLNQLKPLPAVAFNVNNLPFTEPMLSVWAQLVNLAGSKLEKHKIKKSTKQAFAGQVDLDLLRCQQLKLYILKAGRALLSHQDKLRQILSQPAVQETGTVHTDDGAVVSPDLGDMSPEGPQPPMILLQQLLASATQPSPVKAIFDKQELEAAALAVCQCLAVESTHPSSPGFEDCSSSEATTPVAVQHIRPARVKRRKQSPVPALPIVVQLMEMGFSRRNIEFALKSLTGASGNASSLPGVEALVGWLLDHSDIQVTELSDADTVSDEYSDEEVVEDVDDAAYSMSTGAVVTESQTYKKRADFLSNDDYAVYVRENIQVGMMVRCCRAYEEVCEGDVGKVIKLDRDGLHDLNVQCDWQQKGGTYWVRYIHVELIGYPPPSSSSHIKIGDKVRVKASVTTPKYKWGSVTHQSVGVVKAFSANGKDIIVDFPQQSHWTGLLSEMELVPSIHPGVTCDGCQMFPINGSRFKCRNCDDFDFCETCFKTKKHNTRHTFGRINEPGQSAVFCGRSGKQLKRCHSSQPGMLLDSWSRMVKSLNVSSSVNQASRLIDGSEPCWQSSGSQGKHWIRLEIFPDVLVHRLKMIVDPADSSYMPSLVVVSGGNSLNNLIELKTININPSDTTVPLLNDCTEYHRYIEIAIKQCRSSGIDCKIHGLILLGRIRAEEEDLAAVPFLASDNEEEEDEKGNSGSLIRKKAAGLESAATIRTKVFVWGLNDKDQLGGLKGSKIKVPSFSETLSALNVVQVAGGSKSLFAVTVEGKVYACGEATNGRLGLGISSGTVPIPRQITALSSYVVKKVAVHSGGRHATALTVDGKVFSWGEGDDGKLGHFSRMNCDKPRLIEALKTKRIRDIACGSSHSAALTSSGELYTWGLGEYGRLGHGDNTTQLKPKMVKVLLGHRVIQVACGSRDAQTLALTDEGLVFSWGDGDFGKLGRGGSEGCNIPQNIERLNGQGVCQIECGAQFSLALTKSGVVWTWGKGDYFRLGHGSDVHVRKPQVVEGLRGKKIVHVAVGALHCLAVTDSGQVYAWGDNDHGQQGNGTTTVNRKPTLVQGLEGQKITRVACGSSHSVAWTTVDVATPSVHEPVLFQTARDPLGASYLGVPSDADSSAASNKISGASNSKPNRPSLAKILLSLDGNLAKQQALSHILTALQIMYARDAVVGALMPAAMIAPVECPSFSSAAPSDASAMASPMNGEECMLAVDIEDRLSPNPWQEKREIVSSEDAVTPSAVTPSAPSASARPFIPVTDDLGAASIIAETMTKTKEDVESQNKAAGPEPQALDEFTSLLIADDTRVVVDLLKLSVCSRAGDRGRDVLSAVLSGMGTAYPQVADMLLELCVTELEDVATDSQSGRLSSQPVVVESSHPYTDDTSTSGTVKIPGAEGLRVEFDRQCSTERRHDPLTVMDGVNRIVSVRSGREWSDWSSELRIPGDELKWKFISDGSVNGWGWRFTVYPIMPAAGPKELLSDRCVLSCPSMDLVTCLLDFRLNLASNRSIVPRLAASLAACAQLSALAASHRMWALQRLRKLLTTEFGQSININRLLGENDGETRALSFTGSALAALVKGLPEALQRQFEYEDPIVRGGKQLLHSPFFKVLVALACDLELDTLPCCAETHKWAWFRRYCMASRVAVALDKRTPLPRLFLDEVAKKIRELMADSENMDVLHESHDIFKREQDEQLVQWMNRRPDDWTLSAGGSGTIYGWGHNHRGQLGGIEGAKVKVPTPCEALATLRPVQLIGGEQTLFAVTADGKLYATGYGAGGRLGIGGTESVSTPTLLESIQHVFIKKVAVNSGGKHCLALSSEGEVYSWGEAEDGKLGHGNRSPCDRPRVIESLRGIEVVDVAAGGAHSACVTAAGDLYTWGKGRYGRLGHSDSEDQLKPKLVEALQGHRVVDIACGSGDAQTLCLTDDDTVWSWGDGDYGKLGRGGSDGCKVPMKIDSLTGLGVVKVECGSQFSVALTKSGAVYTWGKGDYHRLGHGSDDHVRRPRQVQGLQGKKVIAIATGSLHCVCCTEDGEVYTWGDNDEGQLGDGTTNAIQRPRLVAALQGKKVNRVACGSAHTLAWSTSKPASAGKLPAQVPMEYNHLQEIPIIALRNRLLLLHHLSELFCPCIPMFDLEGSLDETGLGPSVGFDTLRGILISQGKEAAFRKVVQATMVRDRQHGPVVELNRIQVKRSRSKGGLAGPDGTKSVFGQMCAKMSSFGPDSLLLPHRVWKVKFVGESVDDCGGGYSESIAEICEELQNGLTPLLIVTPNGRDESGANRDCYLLSPAARAPVHSSMFRFLGVLLGIAIRTGSPLSLNLAEPVWKQLAGMSLTIADLSEVDKDFIPGLMYIRDNEATSEEFEAMSLPFTVPSASGQDIQLSSKHTHITLDNRAEYVRLAINYRLHEFDEQVAAVREGMARVVPVPLLSLFTGYELETMVCGSPDIPLHLLKSVATYKGIEPSASLIQWFWEVMESFSNTERSLFLRFVWGRTRLPRTIADFRGRDFVIQVLDKYNPPDHFLPESYTCFFLLKLPRYSCKQVLEEKLKYAIHFCKSIDTDDYARIALTGEPAADDSSDDSDNEDVDSFASDSTQDYLTGH

SEQ ID NO: 99 - protein, 593 aa, Synthetic construct
MAEMGSKGVTAGKIASNVQKKLTRAQEKVLQKLGKADETKDEQFEQCVQNFNKQLTEGTRLQKDLRTYLASVKAMHEASKKLNECLQEVYEPDWPGRDEANKIAENNDLLWMDYHQKLVDQALLTMDTYLGQFPDIKSRIAKRGRKLVDYDSARHHYESLQTAKKKDEAKIAKPVSLLEKAAPQWCQGKLQAHLVAQTNLLRNQAEEELIKAQKVFEEMNVDLQEELPSLWNSRVGFYVNTFQSIAGLEENFHKEMSKLNQNLNDVLVGLEKQHGSNTFTVKAQPSDNAPAKGNKSPSPPDGSPAATPEIRVNHEPEPAGGATPGATLPKSPSQLRKGPPVPPPPKHTPSKEVKQEQILSLFEDTFVPEISVTTPSQFEAPGPFSEQASLLDLDFDPLPPVTSPVKAPTPSGQSIPWDLWEPTESPAGSLPSGEPSAAEGTFAVSWPSQTAEPGPAQPAEASEVAGGTQPAAGAQEPGETAASEAASSSLPAVVVETFPATVNGTVEGGSGAGRLDLPPGFMFKVQAQHDYTATDTDELQLKAGDVVLVIPFQNPEEQDEGWLMGVKESDWNQHKELEKCRGVFPENFTERVP

SEQ ID NO: 100 - protein, 344 aa, Synthetic construct
MHRTTRIKITELNPHLMCALCGGYFIDATTIVECLHSFCKTCIVRYLETNKYCPMCDVQVHKTRPLLSIRSDKTLQDIVYKLVPGLFKDEMKRRRDFYAAYPLTEVPNGSNEDRGEVLEQEKGALSDDEIVSLSIEFYEGARDRDEKKGPLENGDGDKEKTGVRFLRCPAAMTVMHLAKFLRNKMDVPSKYKVEVLYEDEPLKEYYTLMDIAYIYPWRRNGPLPLKYRVQPACKRLTLATVPTPSEGTNTSGASECESVSDKAPSPATLPATSSSLPSPATPSHGSPSSHGPPATHPTSPTPPSTASGATTAANGGSLNCLQTPSSTSRGRKMTVNGAPVPPLT

SEQ ID NO: 101 - protein, 526 aa, Synthetic construct
MDVRFYPPPAQPAAAPDAPCLGPSPCLDPYYCNKFDGENMYMSMTEPSQDYVPASQSYPGPSLESEDFNIPPITPPSLPDHSLVHLNEVESGYHSLCHPMNHNGLLPFHPQNMDLPEITVSNMLGQDGTLLSNSISVMPDIRNPEGTQYSSHPQMAAMRPRGQPADIRQQPGMMPHGQLTTINQSQLSAQLGLNMGGSNVPHNSPSPPGSKSATPSPSSSVHEDEGDDTSKINGGEKRPASDMGKKPKTPKKKKKKDPNEPQKPVSAYALFFRDTQAAIKGQNPNATFGEVSKIVASMWDGLGEEQKQVYKKKTEAAKKEYLKQLAAYRASLVSKSYSEPVDVKTSQPPQLINSKPSVFHGPSQAHSALYLSSHYHQQPGMNPHLTAMHPSLPRNIAPKPNNQMPVTVSIANMAVSPPPPLQISPPLHQHLNMQQHQPLTMQQPLGNQLPMQVQSALHSPTMQQGFTLQPDYQTIINPTSTAAQVVTQAMEYVRSGCRNPPPQPVDWNNDYCSSGGMQRDKALYLT

SEQ ID NO: 102 - protein, 472 aa, Synthetic construct
MLGTVKMEGHETSDWNSYYADTQEAYSSVPVSNMNSGLGSMNSMNTYMTMNTMTTSGNMTPASFNMSYANPGLGAGLSPGAVAGMPGGSAGAMNSMTAAGVTAMGTALSPSGMGAMGAQQAASMNGLGPYAAAMNPCMSPMAYAPSNLGRSRAGGGGDAKTFKRSYPHAKPPYSYISLITMAIQQAPSKMLTLSEIYQWIMDLFPYYRQNQQRWQNSIRHSLSFNDCFVKVARSPDKPGKGSYWTLHPDSGNMFENGCYLRRQKRFKCEKQPGAGGGGGSGSGGSGAKGGPESRKDPSGASNPSADSPLHRGVHGKTGQLEGAPAPGPAASPQTLDHSGATATGGASELKTPASSTAPPISSGPGALASVPASHPAHGLAPHESQLHLKGDPHYSFNHPFSINNLMSSSEQQHKLDFKAYEQALQYSPYGSTLPASLPLGSASVTTRSPIEPSALEPAYYQGVYSRPVLNTS

SEQ ID NO: 103 - protein, 457 aa, Synthetic construct
MLGAVKMEGHEPSDWSSYYAEPEGYSSVSNMNAGLGMNGMNTYMSMSAAAMGSGSGNMSAGSMNMSSYVGAGMSPSLAGMSPGAGAMAGMGGSAGAAGVAGMGPHLSPSLSPLGGQAAGAMGGLAPYANMNSMSPMYGQAGLSRARDPKTYRRSYTHAKPPYSYISLITMAIQQSPNKMLTLSEIYQWIMDLFPFYRQNQQRWQNSIRHSLSFNDCFLKVPRSPDKPGKGSFWTLHPDSGNMFENGCYLRRQKRFKCEKQLALKEAAGAAGSGKKAAAGAQASQAQLGEAAGPASETPAGTESPHSSASPCQEHKRGGLGELKGTPAAALSPPEPAPSPGQQQQAAAHLLGPPHHPGLPPEAHLKPEHHYAFNHPFSINNLMSSEQQHHHSHHHHQPHKMDLKAYEQVMHYPGYGSPMPGSLAMGPVTNKTGLDASPLAADTSYYQGVYSRPIMNSS

SEQ ID NO: 104 - protein, 584 aa, Synthetic construct
MASVQASRRQWCYLCDLPKMPWAMVWDFSEAVCRGCVNFEGADRIELLIDAARQLKRSHVLPEGRSPGPPALKHPATKDLAAAAAQGPQLPPPQAQPQPSGTGGGVSGQDRYDRATSSGRLPLPSPALEYTLGSRLANGLGREEAVAEGARRALLGSMPGLMPPGLLAAAVSGLGSRGLTLAPGLSPARPLFGSDFEKEKQQRNADCLAELNEAMRGRAEEWHGRPKAVREQLLALSACAPFNVRFKKDHGLVGRVFAFDATARPPGYEFELKLFTEYPCGSGNVYAGVLAVARQMFHDALREPGKALASSGFKYLEYERRHGSGEWRQLGELLTDGVRSFREPAPAEALPQQYPEPAPAALCGPPPRAPSRNLAPTPRRRKASPEPEGEAAGKMTTEEQQQRHWVAPGGPYSAETPGVPSPIAALKNVAEALGHSPKDPGGGGGPVRAGGASPAASSTAQPPTQHRLVARNGEAEVSPTAGAEAVSGGGSGTGATPGAPLCCTLCRERLEDTHFVQCPSVPGHKFCFPCSREFIKAQGPAGEVYCPSGDKCPLVGSSVPWAFMQGEIATILAGDIKVKKERDP

SEQ ID NO: 105 - protein, 587 aa, Synthetic construct
MAAAVAVAAASRRQSCYLCDLPRMPWAMIWDFTEPVCRGCVNYEGADRVEFVIETARQLKRAHGCFPEGRSPPGAAASAAAKPPPLSAKDILLQQQQQLGHGGPEAAPRAPQALERYPLAAAAERPPRLGSDFGSSRPAASLAQPPTPQPPPVNGILVPNGFSKLEEPPELNRQSPNPRRGHAVPPTLVPLMNGSATPLPTALGLGGRAAASLAAVSGTAAASLGSAQPTDLGAHKRPASVSSSAAVEHEQREAAAKEKQPPPPAHRGPADSLSTAAGAAELSAEGAGKSRGSGEQDWVNRPKTVRDTLLALHQHGHSGPFESKFKKEPALTAGRLLGFEANGANGSKAVARTARKRKPSPEPEGEVGPPKINGEAQPWLSTSTEGLKIPMTPTSSFVSPPPPTASPHSNRTTPPEAAQNGQSPMAALILVADNAGGSHASKDANQVHSTTRRNSNSPPSPSSMNQRRLGPREVGGQGAGNTGGLEPVHPASLPDSSLATSAPLCCTLCHERLEDTHFVQCPSVPSHKFCFPCSRQSIKQQGASGEVYCPSGEKCPLVGSNVPWAFMQGEIATILAGDVKVKKERDS

SEQ ID NO: 106 - protein, 796 aa, Synthetic construct
MSAAQVSSSRRQSCYLCDLPRMPWAMIWDFSEPVCRGCVNYEGADRIEFVIETARQLKRAHGCFQDGRSPGPPPPVGVKTVALSAKEAAAAAAAAAAAAAAAQQQQQQQQQQQQQQQQQQQQQQQQQLNHVDGSSKPAVLAAPSGLERYGLSAAAAAAAAAAAAVEQRSRFEYPPPPVSLGSSSHTARLPNGLGGPNGFPKPTPEEGPPELNRQSPNSSSAAASVASRRGTHGGLVTGLPNPGGGGGPQLTVPPNLLPQTLLNGPASAAVLPPPPPHALGSRGPPTPAPPGAPGGPACLGGTPGVSATSSSASSSTSSSVAEVGVGAGGKRPGSVSSTDQERELKEKQRNAEALAELSESLRNRAEEWASKPKMVRDTLLTLAGCTPYEVRFKKDHSLLGRVFAFDAVSKPGMDYELKLFIEYPTGSGNVYSSASGVAKQMYQDCMKDFGRGLSSGFKYLEYEKKHGSGDWRLLGDLLPEAVRFFKEGVPGADMLPQPYLDASCPMLPTALVSLSRAPSAPPGTGALPPAAPSGRGAAASLRKRKASPEPPDSAEGALKLGEEQQRQQWMANQSEALKLTMSAGGFAAPGHAAGGPPPPPPPLGPHSNRTTPPESAPQNGPSPMAALMSVADTLGTAHSPKDGSSVHSTTASARRNSSSPVSPASVPGQRRLASRNGDLNLQVAPPPPSAHPGMDQVHPQNIPDSPMANSGPLCCTICHERLEDTHFVQCPSVPSHKFCFPCSRESIKAQGATGEVYCPSGEKCPLVGSNVPWAFMQGEIATILAGDVKVKKERDP

SEQ ID NO: 107 - protein, 388 aa, Synthetic construct
MTASVLLHPRWIEPTVMFLYDNGGGLVADELNKNMEGAAAAAAAAAAAAAAGAGGGGFPHPAAAAAGGNFSVAAAAAAAAAAAANQCRNLMAHPAPLAPGAASAYSSAPGEAPPSAAAAAAAAAAAAAAAAAASSSGGPGPAGPAGAEAAKQCSPCSAAAQSSSGPAALPYGYFGSGYYPCARMGPHPNAIKSCAQPASAAAAAAFADKYMDTAGPAAEEFSSRAKEFAFYHQGYAAGPYHHHQPMPGYLDMPVVPGLGGPGESRHEPLGLPMESYQPWALPNGWNGQMYCPKEQAQPPHLWKSTLPDVVSHPSDASSYRRGRKKRVPYTKVQLKELEREYATNKFITKDKRRRISATTNLSERQVTIWFQNRRVKEKKVINKLKTTS

SEQ ID NO: 108 - protein, 284 aa, Synthetic construct
MEPGNYATLDGAKDIEGLLGAGGGRNLVAHSPLTSHPAAPTLMPAVNYAPLDLPGSAEPPKQCHPCPGVPQGTSPAPVPYGYFGGGYYSCRVSRSSLKPCAQAATLAAYPAETPTAGEEYPSRPTEFAFYPGYPGTYQPMASYLDVSVVQTLGAPGEPRHDSLLPVDSYQSWALAGGWNSQMCCQGEQNPPGPFWKAAFADSSGQHPPDACAFRRGRKKRIPYSKGQLRELEREYAANKFITKDKRRKISAATSLSERQITIWFQNRRVKEKKVLAKVKNSATP

SEQ ID NO: 109 - protein, 330 aa, Synthetic construct
MTTSLLLHPRWPESLMYVYEDSAAESGIGGGGGGGGGGTGGAGGGCSGASPGKAPSMDGLGSSCPASHCRDLLPHPVLGRPPAPLGAPQGAVYTDIPAPEAARQCAPPPAPPTSSSATLGYGYPFGGSYYGCRLSHNVNLQQKPCAYHPGDKYPEPSGALPGDDLSSRAKEFAFYPSFASSYQAMPGYLDVSVVPGISGHPEPRHDALIPVEGYQHWALSNGWDSQVYCSKEQSQSAHLWKSPFPDVVPLQPEVSSYRRGRKKRVPYTKVQLKELEKEYAASKFITKEKRRRISATTNLSERQVTIWFQNRRVKEKKVVSKSKAPHLHST

SEQ ID NO: 110 - protein, 313 aa, Synthetic construct
MDFDERGPCSSNMYLPSCTYYVSGPDFSSLPSFLPQTPSSRPMTYSYSSNLPQVQPVREVTFREYAIEPATKWHPRGNLAHCYSAEELVHRDCLQAPSAAGVPGDVLAKSSANVYHHPTPAVSSNFYSTVGRNGVLPQAFDQFFETAYGTPENLASSDYPGDKSAEKGPPAATATSAAAAAAATGAPATSSSDSGGGGGCRETAAAAEEKERRRRPESSSSPESSSGHTEDKAGGSSGQRTRKKRCPYTKYQIRELEREFFFSVYINKEKRLQLSRMLNLTDRQVKIWFQNRRMKEKKINRDRLQYYSANPLL

SEQ ID NO: 111 - protein, 304 aa, Synthetic construct
MFNSVNLGNFCSPSRKERGADFGERGSCASNLYLPSCTYYMPEFSTVSSFLPQAPSRQISYPYSAQVPPVREVSYGLEPSGKWHHRNSYSSCYAAADELMHRECLPPSTVTEILMKNEGSYGGHHHPSAPHATPAGFYSSVNKNSVLPQAFDRFFDNAYCGGGDPPAEPPCSGKGEAKGEPEAPPASGLASRAEAGAEAEAEEENTNPSSSGSAHSVAKEPAKGAAPNAPRTRKKRCPYSKFQIRELEREFFFNVYINKEKRLQLSRMLNLTDRQVKIWFQNRRMKEKKLSRDRLQYFSGNPLL

SEQ ID NO: 112 - protein, 342 aa, Synthetic construct
MTCPRNVTPNSYAEPLAAPGGGERYSRSAGMYMQSGSDFNCGVMRGCGLAPSLSKRDEGSSPSLALNTYPSYLSQLDSWGDPKAAYRLEQPVGRPLSSCSYPPSVKEENVCCMYSAEKRAKSGPEAALYSHPLPESCLGEHEVPVPSYYRASPSYSALDKTPHCSGANDFEAPFEQRASLNPRAEHLESPQLGGKVSFPETPKSDSQTPSPNEIKTEQSLAGPKGSPSESEKERAKAADSSPDTSDNEAKEEIKAENTTGNWLTAKSGRKKRCPYTKHQTLELEKEFLFNMYLTRERRLEISKTINLTDRQVKIWFQNRRMKLKKMNRENRIRELTSNFNFT

SEQ ID NO: 113 - protein, 410 aa, Synthetic construct
MSARKGYLLPSPNYPTTMSCSESPAANSFLVDSLISSGRGEAGGGGGGAGGGGGGGYYAHGGVYLPPAADLPYGLQSCGLFPTLGGKRNEAASPGSGGGGGGLGPGAHGYGPSPIDLWLDAPRSCRMEPPDGPPPPPQQQPPPPPQPPQPAPQATSCSFAQNIKEESSYCLYDSADKCPKVSATAAELAPFPRGPPPDGCALGTSSGVPVPGYFRLSQAYGTAKGYGSGGGGAQQLGAGPFPAQPPGRGFDLPPALASGSADAARKERALDSPPPPTLACGSGGGSQGDEEAHASSSAAEELSPAPSESSKASPEKDSLGNSKGENAANWLTAKSGRKKRCPYTKHQTLELEKEFLFNMYLTRERRLEISRSVHLTDRQVKIWFQNRRMKLKKMNRENRIRELTANFNFS

SEQ ID NO: 114 - protein, 250 aa, Synthetic construct
MSISGTLSSYYVDSIISHESEDAPPAKFPSGQYASSRQPGHAEHLEFPSCSFQPKAPVFGASWAPLSPHASGSLPSVYHPYIQPQGVPPAESRYLRTWLEPAPRGEAAPGQGQAAVKAEPLLGAPGELLKQGTPEYSLETSAGREAVLSNQRPGYGDNKICEGSEDKERPDQTNPSANWLHARSSRKKRCPYTKYQTLELEKEFLFNMYLTRDRRHEVARLLNLSERQVKIWFQNRRMKMKKMNKEQGKE

SEQ ID NO: 115 - protein, 272 aa, Synthetic construct
MATTGALGNYYVDSFLLGADAADELSVGRYAPGTLGQPPRQAATLAEHPDFSPCSFQSKATVFGASWNPVHAAGANAVPAAVYHHHHHHPYVHPQAPVAAAAPDGRYMRSWLEPTPGALSFAGLPSSRPYGIKPEPLSARRGDCPTLDTHTLSLTDYACGSPPVDREKQPSEGAFSENNAENESGGDKPPIDPNNPAANWLHARSTRKKRCPYTKHQTLELEKEFLFNMYLTRDRRYEVARLLNLTERQVKIWFQNRRMKMKKINKDRAKDE

SEQ ID NO: 116 - protein, 80 aa, Homo sapiens
NKKLEAVGTGIEPKAMSQGLVTFGDVAVDFSQEEWEWLNPIQRNLYRKVMLENYRNLASLGLCVSKPDVISSLEQGKEPW

SEQ ID NO: 117 - protein, 80 aa, Homo sapiens
KMKKFQIPVSFQDLTVNFTQEEWQQLDPAQRLLYRDVMLENYSNLVSVGYHVSKPDVIFKLEQGEEPWIVEEFSNQNYPD

SEQ ID NO: 118 - protein, 80 aa, Homo sapiens
CSQESALSEEEEDTTRPLETVTFKDVAVDLTQEEWEQMKPAQRNLYRDVMLENYSNLVTVGCQVTKPDVIFKLEQEEEPW

SEQ ID NO: 119 - protein, 80 aa, Homo sapiens
ITSQGSVSFRDVTVGFTQEEWQHLDPAQRTLYRDVMLENYSHLVSVGYCIPKPEVILKLEKGEEPWILEEKFPSQSHLEL

SEQ ID NO: 120 - protein, 80 aa, Homo sapiens
PQVTFNDVAIDFTHEEWGWLSSAQRDLYKDVMVQNYENLVSVAGLSVTKPYVITLLEDGKEPWMMEKKLSKGMIPDWESR

SEQ ID NO: 121 - protein, 80 aa, Homo sapiens
PLRFSTLFQEQQKMNISQASVSFKDVTIEFTQEEWQQMAPVQKNLYRDVMLENYSNLVSVGYCCFKPEVIFKLEQGEEPW

SEQ ID NO: 122 - protein, 80 aa, Homo sapiens
QDPSAEGLSEEVPVVFEELPVVFEDVAVYFTREEWGMLDKRQKELYRDVMRMNYELLASLGPAAAKPDLISKLERRAAPW

SEQ ID NO: 123 - protein, 80 aa, Homo sapiens
SQGSVTFRDVAIDFSQEEWKWLQPAQRDLYRCVMLENYGHLVSLGLSISKPDVVSLLEQGKEPWLGKREVKRDLFSVSES

SEQ ID NO: 124 - protein, 80 aa, Homo sapiens
GSLTFRDVAIEFSLEEWQCLDTAQQNLYRNVMLENYRNLVFLGIAAFKPDLIIFLEEGKESWNMKRHEMVEESPVICSHF

SEQ ID NO: 125 - protein, 80 aa, Homo sapiens
NKSQEQVSFKDVCVDFTQEEWYLLDPAQKILYRDVILENYSNLVSVGYCITKPEVIFKIEQGEEPWILEKGFPSQCHPER

SEQ ID NO: 126 - protein, 80 aa, Homo sapiens
PHLLVTFRDVAIDFSQEEWECLDPAQRDLYRDVMLENYSNLISLDLESSCVTKKLSPEKEIYEMESLQWENMGKRINHHL

SEQ ID NO: 127 - protein, 80 aa, Homo sapiens
EEERKTAELQKNRIQDSVVFEDVAVDFTQEEWALLDLAQRNLYRDVMLENFQNLASLGYPLHTPHLISQWEQEEDLQTVK

SEQ ID NO: 128 - protein, 80 aa, Homo sapiens
GLLTFRDVAIEFSLEEWQCLDTAQKNLYRNVMLENYRNLAFLGIAVSKPDLIICLEKEKEPWNMKRDEMVDEPPGICPHF

SEQ ID NO: 129 - protein, 80 aa, Homo sapiens
RAPTQVTVSPETHMDLTKGCVTFEDIAIYFSQDEWGLLDEAQRLLYLEVMLENFALVASLGCGHGTEDEETPSDQNVSVG

SEQ ID NO: 130 - protein, 80 aa, Homo sapiens
AAVSPTTRCQESVTFEDVAVVFTDEEWSRLVPIQRDLYKEVMLENYNSIVSLGLPVPQPDVIFQLKRGDKPWMVDLHGSE

SEQ ID NO: 131 - protein, 80 aa, Homo sapiens
HSLEKVTFEDVAIDFTQEEWDMMDTSKRKLYRDVMLENISHLVSLGYQISKSYIILQLEQGKELWREGRVFLQDQNPDRE

SEQ ID NO: 132 - protein, 80 aa, Homo sapiens
DSVSFEDVAVNFTLEEWALLDSSQKKLYEDVMQETFKNLVCLGKKWEDQDIEDDHRNQGKNRRCHMVERLCESRRGSKCG

SEQ ID NO: 133 - protein, 80 aa, Homo sapiens
NVEVVKVMPQDLVTFKDVAIDFSQEEWQWMNPAQKRLYRSMMLENYQSLVSLGLCISKPYVISLLEQGREPWEMTSEMTR

SEQ ID NO: 134 - protein, 80 aa, Homo sapiens
TQPDEDLHLQAEETQLVKESVTFKDVAIDFTLEEWRLMDPTQRNLHKDVMLENYRNLVSLGLAVSKPDMISHLENGKGPW

SEQ ID NO: 135 - protein, 80 aa, Homo sapiens
TMLQESFSFDDLSVDFTQKEWQLLDPSQKNLYKDVMLENYSSLVSLGYEVMKPDVIFKLEQGEEPWVGDGEIPSSDSPEV

SEQ ID NO: 136 - protein, 80 aa, Homo sapiens
EVVTFGDVAVHFSREEWQCLDPGQRALYREVMLENHSSVAGLAGFLVFKPELISRLEQGEEPWVLDLQGAEGTEAPRTSK

SEQ ID NO: 137 - protein, 80 aa, Homo sapiens
RNAEEERMIAVFLTTWLQEPMTFKDVAVEFTQEEWMMLDSAQRSLYRDVMLENYRNLTSVEYQLYRLTVISPLDQEEIRN

SEQ ID NO: 138 - protein, 80 aa, Homo sapiens
GPQGARRQAFLAFGDVTVDFTQKEWRLLSPAQRALYREVTLENYSHLVSLGILHSKPELIRRLEQGEVPWGEERRRRPGP

SEQ ID NO: 139 - protein, 80 aa, Homo sapiens
HSLKKLTFEDVAIDFTQEEWAMMDTSKRKLYRDVMLENISHLVSLGYQISKSYIILQLEQGKELWREGRVFLQDQNPNRE

SEQ ID NO: 140 - protein, 80 aa, Homo sapiens
MPEVEFPDQFFTVLTMDHELVTLRDVVINFSQEEWEYLDSAQRNLYWDVMMENYSNLLSLDLESRNETKHLSVGKDIIQN

SEQ ID NO: 141 - protein, 80 aa, Homo sapiens
PGAPGSLEMGPLTFRDVTIEFSLEEWQCLDTVQQNLYRDVMLENYRNLVFLGMAVFKPDLITCLKQGKEPWNMKRHEMVT

SEQ ID NO: 142 - protein, 80 aa, Homo sapiens
RDPAQVPVAADLLTDHEEGYVTFEDVAVYFSQEEWRLLDDAQRLLYRNVMLENFTLLASLGLASSKTHEITQLESWEEPF

SEQ ID NO: 143 - protein, 80 aa, Homo sapiens
HSLKKVTFEDVAIDFTQEEWAMMDTSKRKLYRDVMLENISHLVSLGYQISKSYIILQLEQGKELWREGREFLQDQNPDRE

SEQ ID NO: 144 - protein, 80 aa, Homo sapiens
TKSKEAVTFKDVAVVFSEEELQLLDLAQRKLYRDVMLENFRNVVSVGHQSTPDGLPQLEREEKLWMMKMATQRDNSSGAK

SEQ ID NO: 145 - protein, 80 aa, Homo sapiens
SQVTFSDVAIDFSHEEWACLDSAQRDLYKDVMVQNYENLVSVGLSVTKPYVIMLLEDGKEPWMMEKKLSKAYPFPLSHSV

SEQ ID NO: 146 - protein, 80 aa, Homo sapiens
PGPLRSLEMESLQFRDVAVEFSLEEWHCLDTAQQNLYRDVMLENYRHLVFLGIIVSKPDLITCLEQGIKPLTMKRHEMIA

SEQ ID NO: 147 - protein, 80 aa, Homo sapiens
LQTTWPQESVTFEDVAVYFTQNQWASLDPAQRALYGEVMLENYANVASLVAFPFPKPALISHLERGEAPWGPDPWDTEIL

SEQ ID NO: 148 - protein, 80 aa, Homo sapiens
APLLAPRPGETRPGCRKPGTVSFADVAVYFSPEEWGCLRPAQRALYRDVMQETYGHLGALGFPGPKPALISWMEQESEAW

SEQ ID NO: 149 - protein, 80 aa, Homo sapiens
NKVEQKSQESVSFKDVTVGFTQEEWQHLDPSQRALYRDVMLENYSNLVSVGYCVHKPEVIFRLQQGEEPWKQEEEFPSQS

SEQ ID NO: 150 - protein, 80 aa, Homo sapiens
CFSQEERMAAGYLPRWSQELVTFEDVSMDFSQEEWELLEPAQKNLYREVMLENYRNVVSLEALKNQCTDVGIKEGPLSPA

SEQ ID NO: 151 - protein, 80 aa, Homo sapiens
DSVAFEDVAVNFTQEEWALLDPSQKNLYREVMQETLRNLTSIGKKWNNQYIEDEHQNPRRNLRRLIGERLSESKESHQHG

SEQ ID NO: 152 - protein, 80 aa, Homo sapiens
MGPAQVPMNSEVIVDPIQGQVNFEDVFVYFSQEEWVLLDEAQRLLYRDVMLENFALMASLGHTSFMSHIVASLVMGSEPW

SEQ ID NO: 153 - protein, 80 aa, Homo sapiens
TTFKEAMTFKDVAVVFTEEELGLLDLAQRKLYRDVMLENFRNLLSVGHQAFHRDTFHFLREEKIWMMKTAIQREGNSGDK

SEQ ID NO: 154 - protein, 80 aa, Homo sapiens
DSTLLQGGHNLLSSASFQEAVTFKDVIVDFTQEEWKQLDPGQRDLFRDVTLENYTHLVSIGLQVSKPDVISQLEQGTEPW

SEQ ID NO: 155 - protein, 80 aa, Homo sapiens
EARSMLVPPQASVCFEDVAMAFTQEEWEQLDLAQRTLYREVTLETWEHIVSLGLFLSKSDVISQLEQEEDLCRAEQEAPR

SEQ ID NO: 156 - protein, 80 aa, Homo sapiens
DSVVFEDVAVDFTLEEWALLDSAQRDLYRDVMLETFRNLASVDDGTQFKANGSVSLQDMYGQEKSKEQTIPNFTGNNSCA

SEQ ID NO: 157 - protein, 80 aa, Homo sapiens
EESHGALISSCNSRTMTDGLVTFRDVAIDFSQEEWECLDPAQRDLYVDVMLENYSNLVSLDLESKTYETKKIFSENDIFE

SEQ ID NO: 158 - protein, 80 aa, Homo sapiens
VITPQIPMVTEEFVKPSQGHVTFEDIAVYFSQEEWGLLDEAQRCLYHDVMLENFSLMASVGCLHGIEAEEAPSEQTLSAQ

SEQ ID NO: 159 - protein, 80 aa, Homo sapiens
VQLRPQTRMATALRDPASGSVTFEDVAVYFSWEEWDLLDEAQKHLYFDVMLENFALTSSLGCWCGVEHEETPSEQRISGE

SEQ ID NO: 160 - protein, 80 aa, Homo sapiens
MQAQESLTLEDVAVDFTWEEWQFLSPAQKDLYRDVMLENYSNLVAVGYQASKPDALSKLERGEETCTTEDEIYSRICSEI

SEQ ID NO: 161 - protein, 80 aa, Homo sapiens
GPLQFRDVAIEFSLEEWHCLDTAQRNLYRDVMLENYRNLVFLGIVVSKPDLVTCLEQGKKPLTMERHEMIAKPPVMSSHF

SEQ ID NO: 162 - protein, 80 aa, Homo sapiens
NMFKEAVTFKDVAVAFTEEELGLLGPAQRKLYRDVMVENFRNLLSVGHPPFKQDVSPIERNEQLWIMTTATRRQGNLGEK

SEQ ID NO: 163 - protein, 80 aa, Homo sapiens
GALTFRDVAIEFSLEEWQCLDTEQQNLYRNVMLDNYRNLVFLGIAVSKPDLITCLEQEKEPWNLKTHDMVAKPPVICSHI

SEQ ID NO: 164 - protein, 80 aa, Homo sapiens
SPQKSSALAPEDHGSSYEGSVSFRDVAIDFSREEWRHLDPSQRNLYRDVMLETYSHLLSVGYQVPEAEVVMLEQGKEPWA

SEQ ID NO: 165 - protein, 80 aa, Homo sapiens
ELLTFRDVAIEFSPEEWKCLDPAQQNLYRDVMLENYRNLISLGVAISNPDLVIYLEQRKEPYKVKIHETVAKHPAVCSHF

SEQ ID NO: 166 - protein, 80 aa, Homo sapiens
EPLKFRDVAIEFSLEEWQCLDTIQQNLYRNVMLENYRNLVFLGIVVSKPDLITCLEQEKEPWTRKRHRMVAEPPVICSHF

SEQ ID NO: 167 - protein, 80 aa, Homo sapiens
PSARGKSKSKAPITFGDLAIYFSQEEWEWLSPIQKDLYEDVMLENYRNLVSLGLSFRRPNVITLLEKGKAPWMVEPVRRR

SEQ ID NO: 168 - protein, 80 aa, Homo sapiens
TKAQESLTLEDVAVDFTWEEWQFLSPAQKDLYRDVMLENYSNLVSVGYQAGKPDALTKLEQGEPLWTLEDEIHSPAHPEI

SEQ ID NO: 169 - protein, 80 aa, Homo sapiens
SQEEVEVAGIKLCKAMSLGSVTFTDVAIDFSQDEWEWLNLAQRSLYKKVMLENYRNLVSVGLCISKPDVISLLEQEKDPW

SEQ ID NO: 170 - protein, 80 aa, Homo sapiens
TKSLESVSFKDVTVDFSRDEWQQLDLAQKSLYREVMLENYFNLISVGCQVPKPEVIFSLEQEEPCMLDGEIPSQSRPDGD

SEQ ID NO: 171 - protein, 80 aa, Homo sapiens
SGCPGAERNLLVYSYFEKETLTFRDVAIEFSLEEWECLNPAQQNLYMNVMLENYKNLVFLGVAVSKQDPVTCLEQEKEPW

SEQ ID NO: 172 - protein, 80 aa, Homo sapiens
PLQGSVSFKDVTVDFTQEEWQQLDPAQKALYRDVMLENYCHFVSVGFHMAKPDMIRKLEQGEELWTQRIFPSYSYLEEDG

SEQ ID NO: 173 - protein, 80 aa, Homo sapiens
PGPPRSLEMGLLTFRDVAIEFSLEEWQHLDIAQQNLYRNVMLENYRNLAFLGIAVSKPDLITCLEQGKEPWNMKRHEMVD

SEQ ID NO: 174 - protein, 80 aa, Homo sapiens
SGHPGSWEMNSVAFEDVAVNFTQEEWALLDPSQKNLYRDVMQETFRNLASIGNKGEDQSIEDQYKNSSRNLRHIISHSGN

SEQ ID NO: 175 - protein, 80 aa, Homo sapiens
SYGSITFGDVAIDFSHQEWEYLSLVQKTLYQEVMMENYDNLVSLAGHSVSKPDLITLLEQGKEPWMIVREETRGECTDLD

SEQ ID NO: 176 - protein, 80 aa, Homo sapiens
DLFVCSGLEPHTPSVGSQESVTFQDVAVDFTEKEWPLLDSSQRKLYKDVMLENYSNLTSLGYQVGKPSLISHLEQEEEPR

SEQ ID NO: 177 - protein, 80 aa, Homo sapiens
FQTAWRQEPVTFEDVAVYFTQNEWASLDSVQRALYREVMLENYANVASLAFPFTTPVLVSQLEQGELPWGLDPWEPMGRE

SEQ ID NO: 178 - protein, 80 aa, Homo sapiens
ELLTFRDVAIEFSPEEWKCLDPDQQNLYRDVMLENYRNLVSLGVAISNPDLVTCLEQRKEPYNVKIHKIVARPPAMCSHF

SEQ ID NO: 179 - protein, 80 aa, Homo sapiens
AGEAEAQLDPSLQGLVMFEDVTVYFSREEWGLLNVTQKGLYRDVMLENFALVSSLGLAPSRSPVFTQLEDDEQSWVPSWV

SEQ ID NO: 180 - protein, 80 aa, Homo sapiens
AHALVTFRDVAIDFSQKEWECLDTTQRKLYRDVMLENYNNLVSLGYSGSKPDVITLLEQGKEPCVVARDVTGRQCPGLLS

SEQ ID NO: 181 - protein, 80 aa, Homo sapiens
KRIKHWKMASKLILPESLSLLTFEDVAVYFSEEEWQLLNPLEKTLYNDVMQDIYETVISLGLKLKNDTGNDHPISVSTSE

SEQ ID NO: 182 - protein, 80 aa, Homo sapiens
DSVVFEDVAVDFTLEEWALLDSAQRDLYRDVMLETFQNLASVDDETQFKASGSVSQQDIYGEKIPKESKIATFTRNVSWA

SEQ ID NO: 183 - protein, 80 aa, Homo sapiens
NMSQASVSFQDVTVEFTREEWQHLGPVERTLYRDVMLENYSHLISVGYCITKPKVISKLEKGEEPWSLEDEFLNQRYPGY

SEQ ID NO: 184 - protein, 80 aa, Homo sapiens
ISFQESVTFQDVAVDFTAEEWQLLDCAERTLYWDVMLENYRNLISVGCPITKTKVILKVEQGQEPWMVEGANPHESSPES

SEQ ID NO: 185 - protein, 80 aa, Homo sapiens
NTLQGPVSFKDVAVDFTQEEWQQLDPDEKITYRDVMLENYSHLVSVGYDTTKPNVIIKLEQGEEPWIMGGEFPCQHSPEA

SEQ ID NO: 186 - protein, 80 aa, Homo sapiens
HPEEEERMHDELLQAVSKGPVMFRDVSIDFSQEEWECLDADQMNLYKEVMLENFSNLVSVGLSNSKPAVISLLEQGKEPW

SEQ ID NO: 187 - protein, 80 aa, Homo sapiens
SLGSELFRDVAIVFSQEEWQWLAPAQRDLYRDVMLETYSNLVSLGLAVSKPDVISFLEQGKEPWMVERVVSGGLCPVLES

SEQ ID NO: 188 - protein, 80 aa, Homo sapiens
TKFQEMVTFKDVAVVFTEEELGLLDSVQRKLYRDVMLENFRNLLLVAHQPFKPDLISQLEREEKLLMVETETPRDGCSGR

SEQ ID NO: 189 - protein, 80 aa, Homo sapiens
AKRPGPPGSREMGLLTFRDIAIEFSLAEWQCLDHAQQNLYRDVMLENYRNLVSLGIAVSKPDLITCLEQNKEPQNIKRNE

SEQ ID NO: 190 - protein, 80 aa, Homo sapiens
TCMVHRQTMSCSGAGGITAFVAFRDVAVYFTQEEWRLLSPAQRTLHREVMLETYNHLVSLEIPSSKPKLIAQLERGEAPW

SEQ ID NO: 191 - protein, 80 aa, Homo sapiens
IQAQESITLEDVAVDFTWEEWQLLGAAQKDLYRDVMLENYSNLVAVGYQASKPDALFKLEQGEQLWTIEDGIHSGACSDI

SEQ ID NO: 192 - protein, 80 aa, Homo sapiens
AQKRRKRKAKESGMALPQGHLTFRDVAIEFSQAEWKCLDPAQRALYKDVMLENYRNLVSLGISLPDLNINSMLEQRREPW

SEQ ID NO: 193 - protein, 80 aa, Homo sapiens
DSTSVPVTAEAKLMGFTQGCVTFEDVAIYFSQEEWGLLDEAQRLLYRDVMLENFALITALVCWHGMEDEETPEQSVSVEG

SEQ ID NO: 194 - protein, 80 aa, Homo sapiens
GPLTFRDVKIEFSLEEWQCLDTAQRNLYRDVMLENYRNLVFLGIAVSKPDLITWLEQGKEPWNLKRHEMVDKTPVMCSHF

SEQ ID NO: 195 - protein, 80 aa, Homo sapiens
SGCPGAERSLLVQSYFEKGPLTFRDVAIEFSLEEWQCLDSAQQGLYRKVMLENYRNLVFLAGIALTKPDLITCLEQGKEP

SEQ ID NO: 196 - protein, 80 aa, Homo sapiens
GVLTFRDVAVEFSPEEWECLDSAQQRLYRDVMLENYGNLVSLGLAIFKPDLMTCLEQRKEPWKVKRQEAVAKHPAGSFHF

SEQ ID NO: 197 - protein, 80 aa, Homo sapiens
KENLEDISGWGLPEARSKESVSFKDVAVDFTQEEWGQLDSPQRALYRDVMLENYQNLLALGPPLHKPDVISHLERGEEPW

SEQ ID NO: 198 - protein, 80 aa, Homo sapiens
EESEKPRGFARGLEPERIIGATDSSGELMFLMKWKNSDEADLVPAKEANVKCPQVVISFYEERLTWHSYPSEDDDKKDDK

SEQ ID NO: 199 - protein, 80 aa, Homo sapiens
ASVALEDVAVNFTREEWALLGPCQKNLYKDVMQETIRNLDCVVMKWKDQNIEDQYRYPRKNLRCRMLERFVESKDGTQCG

SEQ ID NO: 200 - protein, 80 aa, Homo sapiens
TLLTFRDVAIEFSLEEWKCLDLAQQNLYRDVMLENYRNLFSVGLTVCKPGLITCLEQRKEPWNVKRQEAADGHPEMGFHH

SEQ ID NO: 201 - protein, 80 aa, Homo sapiens
AAALRAPTQQVFVAFEDVAIYFSQEEWELLDEMQRLLYRDVMLENFAVMASLGCWCGAVDEGTPSAESVSVEELSQGRTP

SEQ ID NO: 202 - protein, 80 aa, Homo sapiens
NTFQASVSFQDVTVEFSQEEWQHMGPVERTLYRDVMLENYSHLVSVGYCFTKPELIFTLEQGEDPWLLEKEKGFLSRNSP

SEQ ID NO: 203 - protein, 80 aa, Homo sapiens
DSVAFEDVSVSFSQEEWALLAPSQKKLYRDVMQETFKNLASIGEKWEDPNVEDQHKNQGRNLRSHTGERLCEGKEGSQCA

SEQ ID NO: 204 - protein, 80 aa, Homo sapiens
AQGLVTFADVAIDFSQEEWACLNSAQRDLYWDVMLENYSNLVSLDLESAYENKSLPTEKNIHEIRASKRNSDRRSKSLGR

SEQ ID NO: 205 - protein, 80 aa, Homo sapiens
AVDLLSAQEPVTFRDVAVFFSQDEWLHLDSAQRALYREVMLENYSSLVSLGIPFSMPKLIHQLQQGEDPCMVEREVPSDT

SEQ ID NO: 206 - protein, 80 aa, Homo sapiens
SPQRFPALIPGEPGRSFEGSVSFEDVAVDFTRQEWHRLDPAQRTMHKDVMLETYSNLASVGLCVAKPEMIFKLERGEELW

SEQ ID NO: 207 - protein, 80 aa, Homo sapiens
RVLTFRDVAVEFSPEEWECLDSAQQRLYRDVMLENYGNLFSLGLAIFKPDLITYLEQRKEPWNARRQKTVAKHPAGSLHF

SEQ ID NO: 208 - protein, 80 aa, Homo sapiens
AETKDAAQMLVTFKDVAVTFTREEWRQLDLAQRTLYREVMLETCGLLVSLGHRVPKPELVHLLEHGQELWIVKRGLSHAT

SEQ ID NO: 209 - protein, 80 aa, Homo sapiens
IEYQIPVSFKDVVVGFTQEEWHRLSPAQRALYRDVMLETYSNLVSVGYEGTKPDVILRLEQEEAPWIGEAACPGCHCWED

SEQ ID NO: 210 - protein, 80 aa, Homo sapiens
TKFQEAVTFKDVAVAFTEEELGLLDSAQRKLYRDVMLENFRNLVSVGHQSFKPDMISQLEREEKLWMKELQTQRGKHSGD

SEQ ID NO: 211 - protein, 80 aa, Homo sapiens
DEGVAGVMSVGPPAARLQEPVTFRDVAVDFTQEEWGQLDPTQRILYRDVMLETFGHLLSIGPELPKPEVISQLEQGTELW

SEQ ID NO: 212 - protein, 80 aa, Homo sapiens
GPLTFMDVAIEFSVEEWQCLDTAQQNLYRNVMLENYRNLVFLGIAVSKPDLITCLEQGKEPWNMERHEMVAKPPGMCCYF

SEQ ID NO: 213 - protein, 80 aa, Homo sapiens
HQVGLIRSYNSKTMTCFQELVTFRDVAIDFSRQEWEYLDPNQRDLYRDVMLENYRNLVSLGGHSISKPVVVDLLERGKEP

SEQ ID NO: 214 - protein, 80 aa, Homo sapiens
NATIVMSVRREQGSSSGEGSLSFEDVAVGFTREEWQFLDQSQKVLYKEVMLENYINLVSIGYRGTKPDSLFKLEQGEPPG

SEQ ID NO: 215 - protein, 80 aa, Homo sapiens
FPPARGKELLSFEDVAMYFTREEWGHLNWGQKDLYRDVMLENYRNMVLLGFQFPKPEMICQLENWDEQWILDLPRTGNRK

SEQ ID NO: 216 - protein, 80 aa, Homo sapiens
ELLTFKDVAIEFSPEEWKCLDTSQQNLYRDVMLENYRNLVSLGVSISNPDLVTSLEQRKEPYNLKIHETAARPPAVCSHF

SEQ ID NO: 217 - protein, 80 aa, Homo sapiens
MKSQGLVSFKDVAVDFTQEEWQQLDPSQRTLYRDVMLENYSHLVSMGYPVSKPDVISKLEQGEEPWIIKGDISNWIYPDE

SEQ ID NO: 218 - protein, 80 aa, Homo sapiens
AEGSVMFSDVSIDFSQEEWDCLDPVQRDLYRDVMLENYGNLVSMGLYTPKPQVISLLEQGKEPWMVGRELTRGLCSDLES

SEQ ID NO: 219 - protein, 80 aa, Homo sapiens
GPLTFTDVAIEFSLEEWQCLDTAQQNLYRNVMLENYRNLVFLGIAVSKPDLITCLEKEKEPCKMKRHEMVDEPPVVCSHF

SEQ ID NO: 220 - protein, 80 aa, Homo sapiens
ALSQGLFTFKDVAIEFSQEEWECLDPAQRALYRDVMLENYRNLLSLDEDNIPPEDDISVGFTSKGLSPKENNKEELYHLV

SEQ ID NO: 221 - protein, 80 aa, Homo sapiens
NMEGLVMFQDLSIDFSQEEWECLDAAQKDLYRDVMMENYSSLVSLGLSIPKPDVISLLEQGKEPWMVSRDVLGGWCRDSE

SEQ ID NO: 222 - protein, 80 aa, Homo sapiens
AVSHLPTMVQESVTFKDVAILFTQEEWGQLSPAQRALYRDVMLENYSNLVSLGLLGPKPDTFSQLEKREVWMPEDTPGGF

SEQ ID NO: 223 - protein, 80 aa, Homo sapiens
GPLTIRDVTVEFSLEEWHCLDTAQQNLYRDVMLENYRNLVFLGIAVSKPDLITCLEQGKEPCNMKRHEMVAKPPVMCSHI

SEQ ID NO: 224 - protein, 80 aa, Homo sapiens
AAAVLTDRAQVSVTFDDVAVTFTKEEWGQLDLAQRTLYQEVMLENCGLLVSLGCPVPKAELICHLEHGQEPWTRKEDLSQ

SEQ ID NO: 225 - protein, 80 aa, Homo sapiens
ALRSVMFSDVSIDFSPEEWEYLDLEQKDLYRDVMLENYSNLVSLGCFISKPDVISSLEQGKEPWKVVRKGRRQYPDLETK

SEQ ID NO: 226 - protein, 80 aa, Homo sapiens
AHGSVTFRDVAIDFSQEEWEFLDPAQRDLYRDVMWENYSNFISLGPSISKPDVITLLDEERKEPGMVVREGTRRYCPDLE

SEQ ID NO: 227 - protein, 80 aa, Homo sapiens
APRAQIQGPLTFGDVAVAFTRIEWRHLDAAQRALYRDVMLENYGNLVSVGLLSSKPKLITQLEQGAEPWTEVREAPSGTH

SEQ ID NO: 228 - protein, 80 aa, Homo sapiens
GPLQFRDVAIEFSLEEWHCLDTAQRNLYRNVMLENYRNLVFLGIVVSKPDLITCLEQGKKPLTMKKHEMVANPSVTCSHF

SEQ ID NO: 229 - protein, 80 aa, Homo sapiens
TLPRGQPEVLEWGLPKDQDSVAFEDVAVNFTHEEWALLGPSQKNLYRDVMRETIRNLNCIGMKWENQNIDDQHQNLRRNP

SEQ ID NO: 230 - protein, 80 aa, Homo sapiens
PSPDSMTFEDIIVDFTQEEWALLDTSQRKLFQDVMLENISHLVSIGKQLCKSVVLSQLEQVEKLSTQRISLLQGREVGIK

SEQ ID NO: 231 - protein, 80 aa, Homo sapiens
EESREIRAGQIVLKAMAQGLVTFRDVAIEFSLEEWKCLEPAQRDLYREVTLENFGHLASLGLSISKPDVVSLLEQGKEPW

SEQ ID NO: 232 - protein, 80 aa, Homo sapiens
AASAQVSVTFEDVAVTFTQEEWGQLDAAQRTLYQEVMLETCGLLMSLGCPLFKPELIYQLDHRQELWMATKDLSQSSYPG

SEQ ID NO: 233 - protein, 80 aa, Homo sapiens
RESLEDEVTPGLPTAESQELLTFKDISIDFTQEEWGQLAPAHQNLYREVMLENYSNLVSVGYQLSKPSVISQLEKGEEPW

SEQ ID NO: 234 - protein, 80 aa, Homo sapiens
EGEYIKLKVIGQDSSEIHFKVKMTTHLKKLKESYCQRQGVPMNSLRFLFEGQRIADNHTPKELGMEEEDVIEVYQEQTGG

SEQ ID NO: 235 - protein, 80 aa, Homo sapiens
NKSLGPVSFKDVAVDFTQEEWQQLDPEQKITYRDVMLENYSNLVSVGYHIIKPDVISKLEQGEEPWIVEGEFLLQSYPDE

SEQ ID NO: 236 - protein, 80 aa, Homo sapiens
SPGLLTTRKEALMAFRDVAVAFTQKEWKLLSSAQRTLYREVMLENYSHLVSLGIAFSKPKLIEQLEQGDEPWREENEHLL

SEQ ID NO: 237 - protein, 80 aa, Homo sapiens
MFQDSVAFEDVAVTFTQEEWALLDPSQKNLCRDVMQETFRNLASIGKKWKPQNIYVEYENLRRNLRIVGERLFESKEGHQ

SEQ ID NO: 238 - protein, 80 aa, Homo sapiens
ENDHINLKVAGQDGSVVQFKIKRHTPLSKLMKAYCERQGLSMRQIRFRFDGQPINETDTPAQLEMEDEDTIDVFQQQTGG

SEQ ID NO: 239 - protein, 80 aa, Homo sapiens
PGPLGSLEMGVLTFRDVALEFSLEEWQCLDTAQQNLYRNVMLENYRNLVFVGIAASKPDLITCLEQGKEPWNVKRHEMVT

SEQ ID NO: 240 - protein, 80 aa, Homo sapiens
LSQKPQVLGPEKQDGSCEASVSFEDVTVDFSREEWQQLDPAQRCLYRDVMLELYSHLFAVGYHIPNPEVIFRMLKEKEPR

SEQ ID NO: 241 - protein, 80 aa, Homo sapiens
ALTQGQVTFRDVAIEFSQEEWTCLDPAQRTLYRDVMLENYRNLASLGISCFDLSIISMLEQGKEPFTLESQVQIAGNPDG

SEQ ID NO: 242 - protein, 80 aa, Homo sapiens
NKFQGPVTLKDVIVEFTKEEWKLLTPAQRTLYKDVMLENYSHLVSVGYHVNKPNAVFKLKQGKEPWILEVEFPHRGFPED

SEQ ID NO: 243 - protein, 80 aa, Homo sapiens
ELLTFRDVAIEFSPEEWKCLDPAQQNLYRDVMLENYRNLVSLAVYSYYNQGILPEQGIQDSFKKATLGRYGSCGLENICL

SEQ ID NO: 244 - protein, 80 aa, Homo sapiens
SPQKSSALAPEDHGSSYEGSVSFRDVAIDFSREEWRHLDLSQRNLYRDVMLETYSHLLSVGYQVPKPEVVMLEQGKEPWA

SEQ ID NO: 245 - protein, 80 aa, Homo sapiens
NNSQGRVTFEDVTVNFTQGEWQRLNPEQRNLYRDVMLENYSNLVSVGQGETTKPDVILRLEQGKEPWLEEEEVLGSGRAE

SEQ ID NO: 246 - protein, 80 aa, Homo sapiens
AMALPMPGPQEAVVFEDVAVYFTRIEWSCLAPDQQALYRDVMLENYGNLASLGFLVAKPALISLLEQGEEPGALILQVAE

SEQ ID NO: 247 - protein, 80 aa, Homo sapiens
DSSQHLVTFEDVAVDFTQEEWTLLDQAQRDLYRDVMLENYKNLIILAGSELFKRSLMSGLEQMEELRTGVTGVLQELDLQ

SEQ ID NO: 248 - protein, 80 aa, Homo sapiens
TTFKEAVTFKDVAVFFTEEELGLLDPAQRKLYQDVMLENFTNLLSVGHQPFHPFHFLREEKFWMMETATQREGNSGGKTI

SEQ ID NO: 249 - protein, 80 aa, Homo sapiens
GPLQFRDVAIEFSLEEWHCLDMAQRNLYRDVMLENYRNLVFLGIVVSKPDLITHLEQGKKPSTMQRHEMVANPSVLCSHF

SEQ ID NO: 250 - protein, 80 aa, Homo sapiens
NKSQGSVSFTDVTVDFTQEEWEQLDPSQRILYMDVMLENYSNLLSVEVWKADDQMERDHRNPDEQARQFLILKNQTPIEE

SEQ ID NO: 251 - protein, 80 aa, Homo sapiens
EEEEMNDGSQMVRSQESLTFQDVAVDFTREEWDQLYPAQKNLYRDVMLENYRNLVALGYQLCKPEVIAQLELEEEWVIER

SEQ ID NO: 252 - protein, 80 aa, Homo sapiens
EEATKKSKEKEPGMALPQGRLTFRDVAIEFSLEEWKCLNPAQRALYRAVMLENYRNLEFVDSSLKSMMEFSSTRHSITGE

SEQ ID NO: 253 - protein, 80 aa, Homo sapiens
EKTPAGRIVADCLTDCYQDSVTFDDVAVDFTQEEWTLLDSTQRSLYSDVMLENYKNLATVGGQIIKPSLISWLEQEESRT

SEQ ID NO: 254 - protein, 80 aa, Homo sapiens
AMSQESLTFKDVFVDFTLEEWQQLDSAQKNLYRDVMLENYSHLVSVGHLVGKPDVIFRLGPGDESWMADGGTPVRTCAGE

SEQ ID NO: 255 - protein, 80 aa, Homo sapiens
DSVAFEDVAVNFTLEEWALLDPSQKNLYRDVMRETFRNLASVGKQWEDQNIEDPFKIPRRNISHIPERLCESKEGGQGEE

SEQ ID NO: 256 - protein, 80 aa, Homo sapiens
MFQDSVAFEDVAVSFTQEEWALLDPSQKNLYRDVMQETFKNLTSVGKTWKVQNIEDEYKNPRRNLSLMREKLCESKESHH

SEQ ID NO: 257 - protein, 80 aa, Homo sapiens
AVVATLRLSAQGTVTFEDVAVKFTQEEWNLLSEAQRCLYRDVTLENLALMSSLGCWCGVEDEAAPSKQSIYIQRETQVRT

SEQ ID NO: 258 - protein, 80 aa, Homo sapiens
EEEEEDEDEDDLLTAGCQELVTFEDVAVYFSLEEWERLEADQRGLYQEVMQENYGILVSLGYPIPKPDLIFRLEQGEEPW

SEQ ID NO: 259 - protein, 80 aa, Homo sapiens
TKFQEMVTFKDVAVVFTREELGLLDLAQRKLYQDVMLENFRNLLSVGYQPFKLDVILQLGKEDKLRMMETEIQGDGCSGH

SEQ ID NO: 260 - protein, 80 aa, Homo sapiens
EEAAQKRKGKEPGMALPQGRLTFRDVAIEFSLAEWKCLNPSQRALYREVMLENYRNLEAVDISSKCMMKEVLSTGQGNTE

SEQ ID NO: 261 - protein, 80 aa, Homo sapiens
DTVVFEDVVVDFTLEEWALLNPAQRKLYRDVMLETFKHLASVDNEAQLKASGSISQQDTSGEKLSLKQKIEKFTRKNIWA

SEQ ID NO: 262 - protein, 80 aa, Homo sapiens
TTFKEGLTFKDVAVVFTEEELGLLDPVQRNLYQDVMLENFRNLLSVGHHPFKHDVFLLEKEKKLDIMKTATQRKGKSADK

SEQ ID NO: 263 - protein, 80 aa, Homo sapiens
SALQQEFWKIQTSNGIQMDLVTFDSVAVEFTQEEWTLLDPAQRNLYSDVMLENYKNLSSVGYQLFKPSLISWLEEEEELS

SEQ ID NO: 264 - protein, 80 aa, Homo sapiens
DCVIFEEVAVNFTPEEWALLDHAQRSLYRDVMLETCRNLASLDCYIYVRTSGSSSQRDVFGNGISNDEEIVKFTGSDSWS

SEQ ID NO: 265 - protein, 80 aa, Homo sapiens
ELLTFRDVTIEFSLEEWEFLNPAQQSLYRKVMLENYRNLVSLGLTVSKPELISRLEQRQEPWNVKRHETIAKPPAMSSHY

SEQ ID NO: 266 - protein, 80 aa, Homo sapiens
IKTQESLTLEDVAVEFSWEEWQLLDTAQKNLYRDVMVENYNHLVSLGYQTSKPDVLSKLAHGQEPWTTDAKIQNKNCPGI

SEQ ID NO: 267 - protein, 80 aa, Homo sapiens
PAHVPGEAGPRRTRESRPGAVSFADVAVYFSPEEWECLRPAQRALYRDVMRETFGHLGALGFSVPKPAFISWVEGEVEAW

SEQ ID NO: 268 - protein, 80 aa, Homo sapiens
GCPGDQVTPTRSLTAQLQETMTFKDVEVTFSQDEWGWLDSAQRNLYRDVMLENYRNMASLVGPFTKPALISWLEAREPWG

SEQ ID NO: 269 - protein, 80 aa, Homo sapiens
ARDLVMFRDVAVDFSQEEWECLNSYQRNLYRDVILENYSNLVSLAGCSISKPDVITLLEQGKEPWMVVRDEKRRWTLDLE

SEQ ID NO: 270 - protein, 80 aa, Homo sapiens
TTLKEAVTFKDVAVVFTEEELRLLDLAQRKLYREVMLENFRNLLSVGHQSLHRDTFHFLKEEKFWMMETATQREGNLGGK

SEQ ID NO: 271 - protein, 80 aa, Homo sapiens
SPPSPRSSMAAVALRDSAQGMTFEDVAIYFSQEEWELLDESQRFLYCDVMLENFAHVTSLGYCHGMENEAIASEQSVSIQ

SEQ ID NO: 272 - protein, 80 aa, Homo sapiens
DEEAQKRKAKESGMALPQGRLTFMDVAIEFSQEEWKSLDPGQRALYRDVMLENYRNLVFLGICLPDLSIISMLKQRREPL

SEQ ID NO: 273 - protein, 80 aa, Homo sapiens
ALTQGPLKFMDVAIEFSQEEWKCLDPAQRTLYRDVMLENYRNLVSLGICLPDLSVTSMLEQKRDPWTLQSEEKIANDPDG

SEQ ID NO: 274 - protein, 80 aa, Homo sapiens
TMFKEAVTFKDVAVVFTEEELGLLDVSQRKLYRDVMLENFRNLLSVGHQLSHRDTFHFQREEKFWIMETATQREGNSGGK

SEQ ID NO: 275 - protein, 80 aa, Homo sapiens
QGTVAFEDVAVNFSQEEWSLLSEVQRCLYHDVMLENWVLISSLGCWCGSEDEEAPSKKSISIQRVSQVSTPGAGVSPKKA

SEQ ID NO: 276 - protein, 80 aa, Homo sapiens
AEAFGDSEEDGEDVFEVEKILDMKTEGGKVLYKVRWKGYTSDDDTWEPEIHLEDCKEVLLEFRKKIAENKAKAVRKDIQR

SEQ ID NO: 277 - protein, 80 aa, Homo sapiens
VLQMQNSEHHGQSIKTQTDSISLEDVAVNFTLEEWALLDPGQRNIYRDVMRATFKNLACIGEKWKDQDIEDEHKNQGRNL

SEQ ID NO: 278 - protein, 80 aa, Homo sapiens
AMALTDPAQVSVTFDDVAVTFTQEEWGQLDLAQRTLYQEVMLENCGLLVSLGCPVPRPELIYHLEHGQEPWTRKEDLSQG

SEQ ID NO: 279 - protein, 80 aa, Homo sapiens
VHGSVTFRDVAIDFSQEEWECLQPDQRTLYRDVMLENYSHLISLGSSISKPDVITLLEQEKEPWIVVSKETSRWYPDLES

SEQ ID NO: 280 - protein, 80 aa, Homo sapiens
DPVACEDVAVNFTQEEWALLDISQRKLYREVMLETFRNLTSIGKKWKDQNIEYEYQNPRRNFRSLIEGNVNEIKEDSHCG

SEQ ID NO: 281 - protein, 80 aa, Homo sapiens
IKFQERVTFKDVAVVFTKEELALLDKAQINLYQDVMLENFRNLMLVRDGIKNNILNLQAKGLSYLSQEVLHCWQIWKQRI

SEQ ID NO: 282 - protein, 80 aa, Homo sapiens
GPLTFRDVAIEFSLKEWQCLDTAQRNLYRNVMLENYRNLVFLGITVSKPDLITCLEQGKEAWSMKRHEIMVAKPTVMCSH

SEQ ID NO: 283 - protein, 80 aa, Homo sapiens
TMSKEAVTFKDVAVVFTEEELGLLDLAQRKLYRDVMLENFRNLLSVGHQPFHRDTFHFLREEKFWMMDIATQREGNSGGK

SEQ ID NO: 284 - protein, 80 aa, Homo sapiens
GPLEFRDVAIEFSLEEWHCLDTAQQNLYRDVMLENYRHLVFLGIVVTKPDLITCLEQGKKPFTVKRHEMIAKSPVMCFHF

SEQ ID NO: 285 - protein, 80 aa, Homo sapiens
GHTEGGELVNELLKSWLKGLVTFEDVAVEFTQEEWALLDPAQRTLYRDVMLENCRNLASLGNQVDKPRLISQLEQEDKVM

SEQ ID NO: 286 - protein, 80 aa, Homo sapiens
AEPASVTVTFDDVALYFSEQEWEILEKWQKQMYKQEMKTNYETLDSLGYAFSKPDLITWMEQGRMLLISEQGCLDKTRRT

SEQ ID NO: 287 - protein, 80 aa, Homo sapiens
HSQASAISQDREEKIMSQEPLSFKDVAVVFTEEELELLDSTQRQLYQDVMQENFRNLLSVGERNPLGDKNGKDTEYIQDE

SEQ ID NO: 288 - protein, 80 aa, Homo sapiens
GSLEEGRRATGLPAAQVQEPVTFKDVAVDFTQEEWGQLDLVQRTLYRDVMLETYGHLLSVGNQIAKPEVISLLEQGEEPW

SEQ ID NO: 289 - protein, 80 aa, Homo sapiens
TTFKEAVTFKDVAVVFTEEELGLLDPAQRKLYRDVMLENFRNLLSVGHQPFHQDTCHFLREEKFWMMGTATQREGNSGGK

SEQ ID NO: 290 - protein, 80 aa, Homo sapiens
AKLYEAVTFKDVAVIFTEEELGLLDPAQRKLYRDVMLENFRNLLSVGGKIQTEMETVPEAGTHEEFSCKQIWEQIASDLT

SEQ ID NO: 291 - protein, 80 aa, Homo sapiens
RSDLFLPDSQTNEERKQYDSVAFEDVAVNFTQEEWALLGPSQKSLYRDVMWETIRNLDCIGMKWEDTNIEDQHRNPRRSL

SEQ ID NO: 292 - protein, 80 aa, Homo sapiens
PGTPGSLEMGLLTFRDVAIEFSPEEWQCLDTAQQNLYRNVMLENYRNLAFLGIALSKPDLITYLEQGKEPWNMKQHEMVD

SEQ ID NO: 293 - protein, 80 aa, Homo sapiens
TPGVRVSTDPEQVTFEDVVVGFSQEEWGQLKPAQRTLYRDVMLDTFRLLVSVGHWLPKPNVISLLEQEAELWAVESRLPQ

SEQ ID NO: 294 - protein, 80 aa, Homo sapiens
EQTQAAGMVAGWLINCYQDAVTFDDVAVDFTQEEWTLLDPSQRDLYRDVMLENYENLASVEWRLKTKGPALRQDRSWFRA

SEQ ID NO: 295 - protein, 80 aa, Homo sapiens
PSEANSIQSANATTKTSETNHTSRPRLKNVDRSTAQQLAVTVGNVTVIITDFKEKTRSSSTSSSTVTSSAGSEQQNQSSS

SEQ ID NO: 296 - protein, 80 aa, Homo sapiens
ALTQGQLSFSDVAIEFSQEEWKCLDPGQKALYRDVMLENYRNLVSLGEDNVRPEACICSGICLPDLSVTSMLEQKRDPWT

SEQ ID NO: 297 - protein, 80 aa, Homo sapiens
AAAAALRAPAQSSVTFEDVAVNFSLEEWSLLNEAQRCLYRDVMLETLTLISSLGCWHGGEDEAAPSKQSTCIHIYKDQGG

SEQ ID NO: 298 - protein, 80 aa, Homo sapiens
AQGSVSFNDVTVDFTQEEWQHLDHAQKTLYMDVMLENYCHLISVGCHMTKPDVILKLERGEEPWTSFAGHTCLEENWKAE

SEQ ID NO: 299 - protein, 80 aa, Homo sapiens
DPVAFKDVAVNFTQEEWALLDISQRKLYREVMLETFRNLTSLGKRWKDQNIEYEHQNPRRNFRSLIEEKVNEIKDDSHCG

SEQ ID NO: 300 - protein, 80 aa, Homo sapiens
SKDLVTFGDVAVNFSQEEWEWLNPAQRNLYRKVMLENYRSLVSLGVSVSKPDVISLLEQGKEPWMVKKEGTRGPCPDWEY

SEQ ID NO: 301 - protein, 80 aa, Homo sapiens
DSVAFEDVAINFTCEEWALLGPSQKSLYRDVMQETIRNLDCIGMIWQNHDIEEDQYKDLRRNLRCHMVERACEIKDNSQC

SEQ ID NO: 302 - protein, 80 aa, Homo sapiens
GPLTFMDVAIEFCLEEWQCLDIAQQNLYRNVMLENYRNLVFLGIAVSKPDLITCLEQEKEPWEPMRRHEMVAKPPVMCSH

SEQ ID NO: 303 - protein, 80 aa, Homo sapiens
QSNDIARGFERGLEPEKIIGATDSCGDLMFLMKWKDTDEADLVLAKEANVKCPQIVIAFYEERLTWHAYPEDAENKEKET

SEQ ID NO: 304 - protein, 80 aa, Homo sapiens
ALPAKDSAWPWEEKPRYLGPVTFEDVAVLFTEAEWKRLSLEQRNLYKEVMLENLRNLVSLAESKPEVHTCPSCPLAFGSQ

SEQ ID NO: 305 - protein, 80 aa, Homo sapiens
DAKSLTAWSRTLVTFKDVFVDFTREEWKLLDTAQQIVYRNVMLENYKNLVSLGYQLTKPDVILRLEKGEEPWLVEREIHQ

SEQ ID NO: 306 - protein, 80 aa, Homo sapiens
DAVAFEDVAVNFTQEEWALLGPSQKNLYRYVMQETIRNLDCIRMIWEEQNTEDQYKNPRRNLRCHMVERFSESKDSSQCG

SEQ ID NO: 307 - protein, 80 aa, Homo sapiens
EKTKVERMVEDYLASGYQDSVTFDDVAVDFTPEEWALLDTTEKYLYRDVMLENYMNLASVEWEIQPRTKRSSLQQGFLKN

SEQ ID NO: 308 - protein, 80 aa, Homo sapiens
DSVAFEDVDVNFTQEEWALLDPSQKNLYRDVMWETMRNLASIGKKWKDQNIKDHYKHRGRNLRSHMLERLYQTKDGSQRG

SEQ ID NO: 309 - protein, 80 aa, Homo sapiens
IESQEPVTFEDVAVDFTQEEWQQLNPAQKTLHRDVMLETYNHLVSVGCSGIKPDVIFKLEHGKDPWIIESELSRWIYPDR

SEQ ID NO: 310 - protein, 80 aa, Homo sapiens
AVGLCKAMSQGLVTFRDVALDFSQEEWEWLKPSQKDLYRDVMLENYRNLVWLGLSISKPNMISLLEQGKEPWMVERKMSQ

SEQ ID NO: 311 - protein, 80 aa, Homo sapiens
DKVEEEAMAPGLPTACSQEPVTFADVAVVFTPEEWVFLDSTQRSLYRDVMLENYRNLASVADQLCKPNALSYLEERGEQW

SEQ ID NO: 312 - protein, 80 aa, Homo sapiens
TFEDVAVYFSQEEWGLLDTAQRALYRHVMLENFTLVTSLGLSTSRPRVVIQLERGEEPWVPSGKDMTLARNTYGRLNSGS

SEQ ID NO: 313 - protein, 80 aa, Homo sapiens
AEPPRLPLTFEDVAIYFSEQEWQDLEAWQKELYKHVMRSNYETLVSLDDGLPKPELISWIEHGGEPFRKWRESQKSGNII

SEQ ID NO: 314 - protein, 80 aa, Homo sapiens
DSVVFEDVAVNFTQEEWALLGPSQKKLYRDVMQETFVNLASIGENWEEKNIEDHKNQGRKLRSHMVERLCERKEGSQFGE

SEQ ID NO: 315 - protein, 80 aa, Homo sapiens
AAAALRDPAQGCVTFEDVTIYFSQEEWVLLDEAQRLLYCDVMLENFALIASLGLISFRSHIVSQLEMGKEPWVPDSVDMT

SEQ ID NO: 316 - protein, 80 aa, Homo sapiens
AAPALALVSFEDVVVTFTGEEWGHLDLAQRTLYQEVMLETCRLLVSLGHPVPKPELIYLLEHGQELWTVKRGLSQSTCAG

SEQ ID NO: 317 - protein, 80 aa, Homo sapiens
IKSQESLTLEDVAVEFTWEEWQLLGPAQKDLYRDVMLENYSNLVSVGYQASKPDALFKLEQGEPWTVENEIHSQICPEIK

SEQ ID NO: 318 - protein, 80 aa, Homo sapiens
GESLESRVTLGSLTAESQELLTFKDVSVDFTQEEWGQLAPAHRNLYREVMLENYGNLVSVGCQLSKPGVISQLEKGEEPW

SEQ ID NO: 319 - protein, 80 aa, Homo sapiens
ASVALEDVAVNFTREEWALLGPCQKNLYKDVMQETIRNLDCVGMKWKDQNIEDQYRYPRKNLRCRMLERFVESKDGTQCG

SEQ ID NO: 320 - protein, 80 aa, Homo sapiens
TESQGTVTFKDVAIDFTQEEWKRLDPAQRKLYRNVMLENYNNLITVGYPFTKPDVIFKLEQEEEPWVMEEEVLRRHWQGE

SEQ ID NO: 321 - protein, 80 aa, Homo sapiens
DSVASEDVAVNFTLEEWALLDPSQKKLYRDVMRETFRNLACVGKKWEDQSIEDWYKNQGRILRNHMEEGLSESKEYDQCG

SEQ ID NO: 322 - protein, 80 aa, Homo sapiens
EETQGELTSSCGSKTMANVSLAFRDVSIDLSQEEWECLDAVQRDLYKDVMLENYSNLVSLGYTIPKPDVITLLEQEKEPW

SEQ ID NO: 323 - protein, 80 aa, Homo sapiens
AAILLTTRPKVPVSFEDVSVYFTKTEWKLLDLRQKVLYKRVMLENYSHLVSLGFSFSKPHLISQLERGEGPWVADIPRTW

SEQ ID NO: 324 - protein, 80 aa, Homo sapiens
KDKVEKEKSEKETTSKKNSHKKTRPRLKNVDRSSAQHLEVTVGDLTVIITDFKEKTKSPPASSAASADQHSQSGSSSDNT

SEQ ID NO: 325 - protein, 80 aa, Homo sapiens
GPLTFTDVAIKFSLEEWQFLDTAQQNLYRDVMLENYRNLVFLGVGVSKPDLITCLEQGKEPWNMKRHKMVAKPPVVCSHF

SEQ ID NO: 326 - protein, 80 aa, Homo sapiens
RKPNPQAMAALFLSAPPQAEVTFEDVAVYLSREEWGRLGPAQRGLYRDVMLETYGNLVSLGVGPAGPKPGVISQLERGDE

SEQ ID NO: 327 - protein, 80 aa, Homo sapiens
LSLSPILLYTCEMFQDPVAFKDVAVNFTQEEWALLDISQKNLYREVMLETFWNLTSIGKKWKDQNIEYEYQNPRRNFRSV

SEQ ID NO: 328 - protein, 80 aa, Homo sapiens
AAGEPRSLLFFQKPVTFEDVAVNFTQEEWDCLDASQRVLYQDVMSETFKNLTSVARIFLHKPELITKLEQEEEQWRETRV

SEQ ID NO: 329 - protein, 80 aa, Homo sapiens
AAMPLKAQYQEMVTFEDVAVHFTKTEWTGLSPAQRALYRSVMLENFGNLTALGYPVPKPALISLLERGDMAWGLEAQDDP

SEQ ID NO: 330 - protein, 80 aa, Homo sapiens
ARVPLTFSDVAIDFSQEEWEYLNSDQRDLYRDVMLENYTNLVSLDFNFTTESNKLSSEKRNYEVNAYHQETWKRNKTFNL

SEQ ID NO: 331 - protein, 80 aa, Homo sapiens
ASRLPTAWSCEPVTFEDVTLGFTPEEWGLLDLKQKSLYREVMLENYRNLVSVEHQLSKPDVVSQLEEAEDFWPVERGIPQ

SEQ ID NO: 332 - protein, 80 aa, Homo sapiens
SKKKRDAADKPRGFARGLDPERIIGATDSSGELMFLMKWKDSDEADLVLAKEANMKCPQIVIAFYEERLTWHSCPEDEAQ

SEQ ID NO: 333 - protein, 80 aa, Homo sapiens
AHKYVGLQYHGSVTFEDVAIAFSQQEWESLDSSQRGLYRDVMLENYRNLVSMGHSRSKPHVIALLEQWKEPEVTVRKDGR

SEQ ID NO: 334 - protein, 80 aa, Homo sapiens
AAARLLPVPAGPQPLSFQAKLTFEDVAVLLSQDEWDRLCPAQRGLYRNVMMETYGNVVSLGLPGSKPDIISQLERGEDPW

SEQ ID NO: 335 - protein, 80 aa, Homo sapiens
AVGLLKAMYQELVTFRDVAVDFSQEEWDCLDSSQRHLYSNVMLENYRILVSLGLCFSKPSVILLLEQGKAPWMVKRELTK

SEQ ID NO: 336 - protein, 80 aa, Homo sapiens
GLLTFRDVAIEFSLEEWQCLDTAQRNLYKNVILENYRNLVFLGIAVSKQDLITCLEQEKEPLTVKRHEMVNEPPVMCSHF

SEQ ID NO: 337 - protein, 80 aa, Homo sapiens
GLLAFRDVALEFSPEEWECLDPAQRSLYRDVMLENYRNLISLGEDSFNMQFLFHSLAMSKPELIICLEARKEPWNVNTEK

SEQ ID NO: 338 - protein, 80 aa, Homo sapiens
NLTEGRVVFEDVAIYFSQEEWGHLDEAQRLLYRDVMLENLALLSSLGSWHGAEDEEAPSQQGFSVGVSEVTASKPCLSSQ

SEQ ID NO: 339 - protein, 80 aa, Homo sapiens
GPAQHTSWPCGSAVPTLKSMVTFEDVAVYFSQEEWELLDAAQRHLYHSVMLENLELVTSLGSWHGVEGEGAHPKQNVSVE

SEQ ID NO: 340 - protein, 80 aa, Homo sapiens
SGYPGAERNLLEYSYFEKGPLTFRDVVIEFSQEEWQCLDTAQQDLYRKVMLENFRNLVFLGIDVSKPDLITCLEQGKDPW

SEQ ID NO: 341 - protein, 80 aa, Homo sapiens
ARKLVMFRDVAIDFSQEEWECLDSAQRDLYRDVMLENYSNLVSLDLPSRCASKDLSPEKNTYETELSQWEMSDRLENCDL

SEQ ID NO: 342 - protein, 80 aa, Homo sapiens
GPLQFRDVAIEFSLEEWHCLDTAQRNLYRNVMLENYSNLVFLGITVSKPDLITCLEQGRKPLTMKRNEMIAKPSVMCSHF

SEQ ID NO: 343 - protein, 80 aa, Homo sapiens
VAGWLTNYSQDSVTFEDVAVDFTQEEWTLLDQTQRNLYRDVMLENYKNLVAVDWESHINTKWSAPQQNFLQGKTSSVVEM

SEQ ID NO: 344 - protein, 80 aa, Homo sapiens
AAAWMAPAQESVTFEDVAVTFTQEEWGQLDVTQRALYVEVMLETCGLLVALGDSTKPETVEPIPSHLALPEEVSLQEQLA

SEQ ID NO: 345 - protein, 80 aa, Homo sapiens
VLEWLFISQEQPKITKSWGPLSFMDVFVDFTWEEWQLLDPAQKCLYRSVMLENYSNLVSLGYQHTKPDIIFKLEQGEELC

SEQ ID NO: 346 - protein, 80 aa, Homo sapiens
AAAVLMDRVQSCVTFEDVFVYFSREEWELLEEAQRFLYRDVMLENFALVATLGFWCEAEHEAPSEQSVSVEGVSQVRTAE

SEQ ID NO: 347 - protein, 80 aa, Homo sapiens
AGSQFPDFKHLGTFLVFEELVTFEDVLVDFSPEELSSLSAAQRNLYREVMLENYRNLVSLGHQFSKPDIISRLEEEESYA

SEQ ID NO: 348 - protein, 80 aa, Homo sapiens
IQSQISFEDVAVDFTLEEWQLLNPTQKNLYRDVMLENYSNLVFLEVWLDNPKMWLRDNQDNLKSMERGHKYDVFGKIFNS

SEQ ID NO: 349 - protein, 80 aa, Homo sapiens
DLVAFEDVAVNFTQEEWSLLDPSQKNLYREVMQETLRNLASIGEKWKDQNIEDQYKNPRNNLRSLLGERVDENTEENHCG

SEQ ID NO: 350 - protein, 80 aa, Homo sapiens
KDEDIKLRVIGQDSSEIHFKVKMTTPLKKLKKSYCQRQGVPVNSLRFLFEGQRIADNHTPEELGMEEEDVIEVYQEQIGG

SEQ ID NO: 351 - protein, 80 aa, Homo sapiens
DSVAFEDVAVNFTQEEWALLSPSQKNLYRDVTLETFRNLASVGIQWKDQDIENLYQNLGIKLRSLVERLCGRKEGNEHRE

SEQ ID NO: 352 - protein, 80 aa, Homo sapiens
RNFWILRLPPGSKGEAPKVPVTFDDVAVYFSELEWGKLEDWQKELYKHVMRGNYETLVSLDYAISKPDILTRIERGEEPC

SEQ ID NO: 353 - protein, 80 aa, Homo sapiens
AAAAPRRPTQQGTVTFEDVAVNFSQEEWCLLSEAQRCLYRDVMLENLALISSLGCWCGSKDEEAPCKQRISVQRESQSRT

SEQ ID NO: 354 - protein, 80 aa, Homo sapiens
SGEDSGSFYSWQKAKREQGLVTFEDVAVDFTQEEWQYLNPPQRTLYRDVMLETYSNLVFVGQQVTKPNLILKLEVEECPA

SEQ ID NO: 355 - protein, 80 aa, Homo sapiens
DSVAFEDVAVNFTQEEWALLGPSQKSLYRNVMQETIRNLDCIEMKWEDQNIGDQCQNAKRNLRSHTCEIKDDSQCGETFG

SEQ ID NO: 356 - protein, 80 aa, Homo sapiens
AAGWLTTWSQNSVTFQEVAVDFSQEEWALLDPAQKNLYKDVMLENFRNLASVGYQLCRHSLISKVDQEQLKTDERGILQG

SEQ ID NO: 357 - protein, 80 aa, Homo sapiens
ENPRNQLMALMLLTAQPQELVMFEEVSVCFTSEEWACLGPIQRALYWDVMLENYGNVTSLEWETMTENEEVTSKPSSSQR

SEQ ID NO: 358 - protein, 80 aa, Homo sapiens
LETYNSLVSLQELVSFEEVAVHFTWEEWQDLDDAQRTLYRDVMLETYSSLVSLGHCITKPEMIFKLEQGAEPWIVEETPN

SEQ ID NO: 359 - protein, 80 aa, Homo sapiens
RHFRRPEPCREPLASPIQDSVAFEDVAVNFTQEEWALLDSSQKNLYREVMQETCRNLASVGSQWKDQNIEDHFEKPGKDI

SEQ ID NO: 360 - protein, 80 aa, Homo sapiens
AAAELTAPAQGIVTFEDVAVYFSWKEWGLLDEAQKCLYHDVMLENLTLTTSLGGSGAGDEEAPYQQSTSPQRVSQVRIPK

SEQ ID NO: 361 - protein, 80 aa, Homo sapiens
AATFQLPGHQEMPLTFQDVAVYFSQAEGRQLGPQQRALYRDVMLENYGNVASLGFPVPKPELISQLEQGKELWVLNLLGA

SEQ ID NO: 362 - protein, 80 aa, Homo sapiens
RSEAGEPPSSLQVKPETPASAAVAVAAAAAPTTTAEKPPAEAQDEPAESLSEFKPFFGNIIITDVTANCLTVTFKEYVTV

SEQ ID NO: 363 - protein, 80 aa, Homo sapiens
HRTTRIKITELNPHLMCALCGGYFIDATTIVECLHSFCKTCIVRYLETNKYCPMCDVQVHKTRPLLSIRSDKTLQDIVYK

SEQ ID NO: 364 - protein, 80 aa, Homo sapiens
ASQEFEVEAIVDKRQDKNGNTQYLVRWKGYDKQDDTWEPEQHLMNCEKCVHDFNRRQTEKQKKLTWTTTSRIFSNNARRR

SEQ ID NO: 365 - protein, 80 aa, Homo sapiens
ASGDLYEVERIVDKRKNKKGKWEYLIRWKGYGSTEDTWEPEHHLLHCEEFIDEFNGLHMSKDKRIKSGKQSSTSKLLRDS

SEQ ID NO: 366 - protein, 80 aa, Homo sapiens
TLIRKADLENHNKDGGFWTVIDGKVYDIKDFQTQSLTGNSILAQFAGEDPVVALEAALQFEDTRESMHAFCVGQYLEPDQ

SEQ ID NO: 367 - protein, 80 aa, Homo sapiens
EKTKIGTMVEDHRSNSYQDSVTFDDVAVEFTPEEWALLDTTQKYLYRDVMLENYMNLASVDFFFCLTSEWEIQPRTKRSS

SEQ ID NO: 368 - protein, 80 aa, Homo sapiens
AHELVMFRDVAIDVSQEEWECLNPAQRNLYKEVMLENYSNLVSLGLSVSKPAVISSLEQGKEPWMVVREETGRWCPGTWK

SEQ ID NO: 369 - protein, 80 aa, Homo sapiens
AFEDVAVYFSQEEWGLLDTAQRALYRRVMLDNFALVASLGLSTSRPRVVIQLERGEEPWVPSGTDTTLSRTTYRRRNPGS

SEQ ID NO: 370 - protein, 80 aa, Homo sapiens
AQLRRGHLTFRDVAIEFSQEEWKCLDPVQKALYRDVMLENYRNLVSLGICLPDLSIISMMKQRTEPWTVENEMKVAKNPD

SEQ ID NO: 371 - protein, 80 aa, Homo sapiens
SDHSLGISRSKTPVDDPMSLLYNMNDCYSKLKELVPSIPQNKKVSKMEILQHVIDYILDLQIALDSHPTIVSLHHQRPGQ

SEQ ID NO: 372 - protein, 80 aa, Homo sapiens
KDPNEPQKPVSAYALFFRDTQAAIKGQNPNATFGEVSKIVASMWDGLGEEQKQVYKKKTEAAKKEYLKQLAAYRASLVSK

SEQ ID NO: 373 - protein, 80 aa, Homo sapiens
QEEKQEDAAICPVTVLPEEPVTFQDVAVDFSREEWGLLGPTQRTEYRDVMLETFGHLVSVGWETTLENKELAPNSDIPEE

SEQ ID NO: 374 - protein, 80 aa, Homo sapiens
DASRLSGRDPSSWTVEDVMQFVREADPQLGPHADLFRKHEIDGKALLLLRSDMMMKYMGLKLGPALKLSYHIDRLKQGKF

SEQ ID NO: 375 - protein, 80 aa, Homo sapiens
AVTFEDVTIIFTWEEWKFLDSSQKRLYREVMWENYTNVMSVENWNESYKSQEEKFRYLEYENFSYWQGWWNAGAQMYENQ

SEQ ID NO: 376 - protein, 80 aa, Homo sapiens
ELSAIGEQVFAVESIRKKRVRKGKVEYLVKWKGWPPKYSTWEPEEHILDPRLVMAYEEKEERDRASGYRKRGPKPKRLLL

SEQ ID NO: 377 - protein, 80 aa, Homo sapiens
GGAGARLPALLDEQQVNVLLYDMNGCYSRLKELVPTLPQNRKVSKVEILQHVIDYIRDLQLELNSESEVGTPGGRGLPVR

SEQ ID NO: 378 - protein, 80 aa, Homo sapiens
VVMAASPGSLHSPQQLAEEATRKRELRLMKNREAAKECRRRKKEYVKCLESRVAVLEVQNKKLIEELETLKDICSPKTDY

SEQ ID NO: 379 - protein, 80 aa, Homo sapiens
GGGPGGRPGREPRQRHTANARERDRTNSVNTAFTALRTLIPTEPADRKLSKIETLRLASSYISHLGNVLLAGEACGDGQP

SEQ ID NO: 380 - protein, 80 aa, Homo sapiens
SGFGYSLPQQQPAAVARRNERERNRVKLVNLGFATLREHVPNGAANKKMSKVETLRSAVEYIRALQQLLDEHDAVSAAFQ

SEQ ID NO: 381 - protein, 80 aa, Homo sapiens
APLPPRDPNGAGPEWREPGAVSFADVAVYFCREEWGCLRPAQRALYRDVMRETYGHLSALGIGGNKPALISWVEEEAELW

SEQ ID NO: 382 - protein, 80 aa, Homo sapiens
KQGFSKDPSTWSVDEVIQFMKHTDPQISGPLADLFRQHEIDGKALFLLKSDVMMKYMGLKLGPALKLCYYIEKLKEGKYS

SEQ ID NO: 383 - protein, 80 aa, Homo sapiens
SGGGSPQSYEELQTQRVMANVRERQRTQSLNEAFAALRKIIPTLPSDKLSKIQTLKLAARYIDFLYQVLQSDELDSKMAS

SEQ ID NO: 384 - protein, 80 aa, Homo sapiens
IAPGVVMASSPALPTQPAEEAARKREVRLMKNREAARECRRKKKEYVKCLENRVAVLENQNKTLIEELKALKDLYCHKSD

SEQ ID NO: 385 - protein, 80 aa, Homo sapiens
SRIPVSKSQPVTPEKHRARKRQAWLWEEDKNLRSGVRKYGEGNWSKILLHYKFNNRTSVMLKDRWRTMKKLKLISSDSED

SEQ ID NO: 386 - protein, 80 aa, Homo sapiens
SLAIARGRGKGPAAEEPLSLLDDMNHCYSRLRELVPGVPRGTQLSQVEILQRVIDYILDLQVVLAEPAPGPPDGPHLPIQ

SEQ ID NO: 387 - protein, 80 aa, Homo sapiens
GSGPPSSGGGLYRDMGAQGGRPSLIARIPVARILGDPEEESWSPSLTNLEKVVVTDVTSNFLTVTIKESNTDQGFFKEKR

SEQ ID NO: 388 - protein, 80 aa, Homo sapiens
ELPAVGEHVFAVESIEKKRIRKGRVEYLVKWRGWSPKYNTWEPEENILDPRLLIAFQNRERQEQLMGYRKRGPKPKPLVV

SEQ ID NO: 389 - protein, 80 aa, Homo sapiens
VDSSSNQLPSSKRMRTAFTSTQLLELEREFASNMYLSRLRRIEIATYLNLSEKQVKIWFQNRRVKHKKEGKGSNHRGGGG

SEQ ID NO: 390 - protein, 80 aa, Homo sapiens
TPGGGGDAGKKRKRRVLFSKAQTYELERRFRQQRYLSAPEREHLASLIRLTPTQVKIWFQNHRYKMKRARAEKGMEVTPL

SEQ ID NO: 391 - protein, 80 aa, Homo sapiens
QTVVMTSPVTLTSQTTKTDDPQLKREIRLMKNREAARECRRKKKEYVKCLENRVAVLENQNKTLIEELKTLKDLYSNKSV

SEQ ID NO: 392 - protein, 80 aa, Homo sapiens
KGSPSAQSFEELQSQRILANVRERQRTQSLNEAFAALRKIIPTLPSDKLSKIQTLKLAARYIDFLYQVLQSDEMDNKMTS

SEQ ID NO: 393 - protein, 80 aa, Homo sapiens
NLTEDYMVFEDVAIHFSQEEWGILNDVQRHLHSDVMLENFALLSSVGCWHGAKDEEAPSKQCVSVGVSQVTTLKPALSTQ

SEQ ID NO: 394 - protein, 80 aa, Homo sapiens
KDPNEPQKPVSAYALFFRDTQAAIKGQNPNATFGEVSKIVASMWDSLGEEQKQVYKRKTEAAKKEYLKALAAYRASLVSK

SEQ ID NO: 395 - protein, 80 aa, Homo sapiens
KDPNEPQKPVSAYALFFRDTQAAIKGQNPNATFGEVSKIVASMWDSLGEEQKQVYKRKTEAAKKEYLKALAAYKDNQECQ

SEQ ID NO: 396 - protein, 80 aa, Homo sapiens
LDGSTWDFCSEDCKSKYLLWYCKAARCHACKRQGKLLETIHWRGQIRHFCNQQCLLRFYSQQNQPNLDTQSGPESLLNSQ

SEQ ID NO: 397 - protein, 80 aa, Homo sapiens
ASVQASRRQWCYLCDLPKMPWAMVWDFSEAVCRGCVNFEGADRIELLIDAARQLKRSHVLPEGRSPGPPALKHPATKDLA

SEQ ID NO: 398 - protein, 80 aa, Homo sapiens
MEGPQPENMQPRTRRTKFTLLQVEELESVFRHTQYPDVPTRRELAENLGVTEDKVRVWFKNKRARCRRHQRELMLANELR

SEQ ID NO: 399 - protein, 80 aa, Homo sapiens
PKIMPKKPAEEGNDSEEVPEASGPQNDGKELCPPGKPTTSEKIHERSGPKRGEHAWTHRLRERKQLVIYEEISDPEEDDE

SEQ ID NO: 400 - protein, 80 aa, Homo sapiens
SAAQVSSSRRQSCYLCDLPRMPWAMIWDFSEPVCRGCVNYEGADRIEFVIETARQLKRAHGCFQDGRSPGPPPPVGVKTV

SEQ ID NO: 401 - protein, 80 aa, Homo sapiens
PGPPGSLEMGPLTFRDVAIEFSLEEWQCLDTAQRNLYRKVMFENYRNLVFLGIAVSKPHLITCLEQGKEPWNRKRQEMVA

SEQ ID NO: 402 - protein, 80 aa, Homo sapiens
NKKKVEEVLEEEEEEYVVEKVLDRRVVKGKVEYLLKWKGFSDEDNTWEPEENLDCPDLIAEFLQSQKTAHETDKSEGGKR

SEQ ID NO: 403 - protein, 80 aa, Homo sapiens
LANVVEKVRLLRLHPGMGLKGDLCERHGEKLKMFCKEDVLIMCEACSQSPEHEAHSVVPMEDVAWEYKWELHEALEHLKK

SEQ ID NO: 404 - protein, 80 aa, Homo sapiens [sequence omitted]

SEQ ID NO: 405 - protein, 80 aa, Homo sapiens
ENSDLLPVAQTEPSIWTVDDVWAFIHSLPGCQDIADEFRAQEIDGQALLLLKEDHLMSAMNIKLGPALKICARINSLKES

SEQ ID NO: 406 - protein, 80 aa, Homo sapiens
AGPGGGSRSGSGRPAAANAARERSRVQTLRHAFLELQRTLPSVPPDTKLSKLDVLLLATTYIAHLTRSLQDDAEAPADAG

SEQ ID NO: 407 - protein, 80 aa, Homo sapiens
QNGKSKKVEEAEPEEFVVEKVLDRRVVNGKVEYFLKWKGFTDADNTWEPEENLDCPELIEAFLNSQKAGKEKDGTKRKSL

SEQ ID NO: 408 - protein, 80 aa, Homo sapiens
QHPPDACAFRRGRKKRIPYSKGQLRELEREYAANKFITKDKRRKISAATSLSERQITIWFQNRRVKEKKVLAKVKNSATP

SEQ ID NO: 409 - protein, 80 aa, Homo sapiens
SMSPTTSSQILARKRRRGIIEKRRRDRINNSLSELRRLVPSAFEKQGSAKLEKAEILQMTVDHLKMLHTAGGKGYFDAHA

SEQ ID NO: 410 - protein, 80 aa, Homo sapiens
LVGMGHHFLPSEPTKWNVEDVYEFIRSLPGCQEIAEEFRAQEIDGQALLLLKEDHLMSAMNIKLGPALKIYARISMLKDS

SEQ ID NO: 411 - protein, 80 aa, Homo sapiens
PANEDAPQPGEHGSACEVSVSFEDVTVDFSREEWQQLDSTQRRLYQDVMLENYSHLLSVGFEVPKPEVIFKLEQGEGPWT

SEQ ID NO: 412 - protein, 80 aa, Homo sapiens
GYSSTENLQLVLERRRVANAKERERIKNLNRGFARLKALVPFLPQSRKPSKVDILKGATEYIQVLSDLLEGAKDSKKQDP

SEQ ID NO: 413 - protein, 80 aa, Homo sapiens
EEAPAPEDVTKWTVDDVCSFVGGLSGCGEYTRVFREQGIDGETLPLLTEEHLLTNMGLKLGPALKIRAQVARRLGRVFYV

SEQ ID NO: 414 - protein, 80 aa, Homo sapiens
GGTLAHTPRRSLPSHHGKKMRMARCGHCRGCLRVQDCGSCVNCLDKPKFGGPNTKKQCCVYRKCDKIEARKMERLAKKGR

SEQ ID NO: 415 - protein, 80 aa, Homo sapiens
LNSPTTTSQIMARKKRRGIIEKRRRDRINNSLSELRRLVPTAFEKQGSAKLEKAEILQMTVDHLKMLQATGGKGYFDAHA

SEQ ID NO: 416 - protein, 80 aa, Homo sapiens
QPVKSELDEEEERRKRRREKNKVAAARCRNKKKERTEFLQRESERLELMNAELKTQIEELKQERQQLILMLNRHRPTCIV

SEQ ID NO: 417 - protein, 80 aa, Homo sapiens
LQPEVSSYRRGRKKRVPYTKVQLKELEKEYAASKFITKEKRRRISATTNLSERQVTIWFQNRRVKEKKVVSKSKAPHLHS

SEQ ID NO: 418 - protein, 80 aa, Homo sapiens
LPVPLDSAFEPAFLRKRNERERQRVRCVNEGYARLRDHLPRELADKRLSKVETLRAAIDYIKHLQELLERQAWGLEGAAG

SEQ ID NO: 419 - protein, 80 aa, Homo sapiens
SPFLQRPLHKRKGGQVRFSNDQTIELEKKFETQKYLSPPERKRLAKMLQLSERQVKTWFQNRRAKWRRLKQENPQSNKKE

SEQ ID NO: 420 - protein, 80 aa, Homo sapiens
IAIATGSLHCVCCTEDGEVYTWGDNDEGQLGDGTTNAIQRPRLVAALQGKKVNRVACGSAHTLAWSTSKPASAGKLPAQV

SEQ ID NO: 421 - protein, 80 aa, Homo sapiens
GGSDASQVPNGKRMRTAFTSTQLLELEREFSSNMYLSRLRRIEIATYLNLSEKQVKIWFQNRRVKHKKEGKGTQRNSHAG

SEQ ID NO: 422 - protein, 80 aa, Homo sapiens
RLDLPPGFMFKVQAQHDYTATDTDELQLKAGDVVLVIPFQNPEEQDEGWLMGVKESDWNQHKELEKCRGVFPENFTERVP

SEQ ID NO: 423 - protein, 80 aa, Homo sapiens
GICKLPGRLRIQPALWSREDVLHWLRWAEQEYSLPCTAEHGFEMNGRALCILTKDDFRHRAPSSGDVLYELLQYIKTQRR

SEQ ID NO: 424 - protein, 80 aa, Homo sapiens
PNYRGCEYSYGPAFTRKRNERERQRVKCVNEGYAQLRHHLPEEYLEKRLSKVETLRAAIKYINYLQSLLYPDKAETKNNP

SEQ ID NO: 425 - protein, 80 aa, Homo sapiens
LHGINPVFLSSNPSRWSVEEVYEFIASLQGCQEIAEEFRSQEIDGQALLLLKEEHLMSAMNIKLGPALKICAKINVLKET

SEQ ID NO: 426 - protein, 80 aa, Homo sapiens
QAGQQQGQQKQKRHRTRFTPAQLNELERSFAKTHYPDIFMREELALRIGLTESRVQVWFQNRRAKWKKRKKTTNVFRAPG

SEQ ID NO: 427 - protein, 80 aa, Homo sapiens
AAAVAVAAASRRQSCYLCDLPRMPWAMIWDFTEPVCRGCVNYEGADRVEFVIETARQLKRAHGCFPEGRSPPGAAASAAA

SEQ ID NO: 428 - protein, 80 aa, Homo sapiens
FSSQTPASIKEEEGSPEKERPPEAEYINSRCVLFTYFQGDISSVVDEHFSRALSQPSSYSPSCTSSKAPRSSGPWRDCSF

SEQ ID NO: 429 - protein, 80 aa, Homo sapiens
DKAGGSSGQRTRKKRCPYTKYQIRELEREFFFSVYINKEKRLQLSRMLNLTDRQVKIWFQNRRMKEKKINRDRLQYYSAN

SEQ ID NO: 430 - protein, 80 aa, Homo sapiens
GAPLSGLQGLPECTRCGHGIVGTIVKARDKLYHPECFMCSDCGLNLKQRGYFFLDERLYCESHAKARVKPPEGYDVVAVY

SEQ ID NO: 431 - protein, 80 aa, Homo sapiens
RRPATAETGGGAAAVARRNERERNRVKLVNLGFQALRQHVPHGGASKKLSKVETLRSAVEYIRALQRLLAEHDAVRNALA

SEQ ID NO: 432 - protein, 80 aa, Homo sapiens
TVQVTGKTRTKEKYRVVYTDHQRLELEKEFHCNRYITIQRKSELAVNLGLSERQVKIWFQNRRAKERKMIKKKISQFENS

SEQ ID NO: 433 - protein, 80 aa, Homo sapiens
EEAAQKRKEKEPGMALPQGHLTFRDVAIEFSLEEWKCLDPTQRALYRAMMLENYRNLHSVDISSKCMMKKFSSTAQGNTE

SEQ ID NO: 434 - protein, 80 aa, Homo sapiens
DIRASQVARWTVDEVAEFVQSLLGCEEHAKCFKKEQIDGKAFLLLTQTDIVKVMKIKLGPALKIYNSILMFRHSQELPEE

SEQ ID NO: 435 - protein, 80 aa, Homo sapiens
LSPLEGTKMTVNNLHPRVTEEDIVELFCVCGALKRARLVHPGVAEVVFVKKDDAITAYKKYNNRCLDGQPMKCNLHMNGN

SEQ ID NO: 436 - protein, 80 aa, Homo sapiens
DNAERPRARRRRKPRVLFSQAQVYELERRFKQQRYLSAPERDQLASVLKLTSTQVKIWFQNRRYKCKRQRQDQTLELVGL

SEQ ID NO: 437 - protein, 80 aa, Homo sapiens
SQVKSKAKKTVDKHSDEYKIRRERNNIAVRKSRDKAKMRNLETQHKVLELTAENERLQKKVEQLSRELSTLRNLFKQLPE

SEQ ID NO: 438 - protein, 80 aa, Homo sapiens
KRDYIRLYGIKCAKCSIGFSKNDFVMRARSKVYHIECFRCVACSRQLIPGDEFALREDGLFCRADHDVVERASLGAGDPL

SEQ ID NO: 439 - protein, 80 aa, Homo sapiens
SLGSQVKTRTKDKYRVVYTDHQRLELEKEFHYSRYITIRRKAELAATLGLSERQVKIWFQNRRAKERKINKKKLQQQQQQ

SEQ ID NO: 440 - protein, 80 aa, Homo sapiens
QGGQRGRPHSRRRHRTTFSPVQLEQLESAFGRNQYPDIWARESLARDTGLSEARIQVWFQNRRAKQRKQERSLLQPLAHL

SEQ ID NO: 441 - protein, 80 aa, Homo sapiens
DALTYLDQVKIRFGSDPATYNGFLEIMKEFKSQSIDTPGVIRRVSQLFHEHPDLIVGFNAFLPLGYRIDIPKNGKLNIQS

SEQ ID NO: 442 - protein, 80 aa, Homo sapiens
RLHLDSNPLKWSVADVVRFIRSTDCAPLARIFLDQEIDGQALLLLTLPTVQECMDLKLGPAIKLCHHIERIKFAFYEQFA

SEQ ID NO: 443 - protein, 80 aa, Homo sapiens
AKGAAPNAPRTRKKRCPYSKFQIRELEREFFFNVYINKEKRLQLSRMLNLTDRQVKIWFQNRRMKEKKLSRDRLQYFSGN

SEQ ID NO: 444 - protein, 80 aa, Homo sapiens
TTGNWLTAKSGRKKRCPYTKHQTLELEKEFLFNMYLTRERRLEISKTINLTDRQVKIWFQNRRMKLKKMNRENRIRELTS

SEQ ID NO: 445 - protein, 80 aa, Homo sapiens
YLVSNVIELLDVDPNDQEEDGANIDLDSQRKGKCAVIKTSTRQTYFLPVIGLVDAEKLKPGDLVGVNKDSYLILETLPTE

SEQ ID NO: 446 - protein, 80 aa, Homo sapiens
KASPTLGKRKKRRHRTVFTAHQLEELEKAFSEAHYPDVYAREMLAVKTELPEDRIQVWFQNRRAKWRKREKRWGGSSVMA

SEQ ID NO: 447 - protein, 80 aa, Homo sapiens
EESERPKPRSRRKPRVLFSQAQVFELERRFKQQRYLSAPEREHLASSLKLTSTQVKIWFQNRRYKCKRQRQDKSLELGAH

SEQ ID NO: 448 - protein, 80 aa, Homo sapiens
VVPGSRQEEVIDHKLTEREWAEEWKHLNNLLNCIMDMVEKTRRSLTVLRRCQEADREELNHWARRYSDAEDTKKGPAPAA

SEQ ID NO: 449 - protein, 80 aa, Homo sapiens
ESPEKKPACRKKKTRTVFSRSQVFQLESTFDMKRYLSSSERAGLAASLHLTETQVKIWFQNRRNKWKRQLAAELEAANLS

SEQ ID NO: 450 - protein, 80 aa, Homo sapiens
RGGVGVGGGRKKKTRTVFSRSQVFQLESTFDLKRYLSSAERAGLAASLQLTETQVKIWFQNRRNKWKRQLAAELEAASLS

SEQ ID NO: 451 - protein, 80 aa, Homo sapiens
ELLAHGRQKILDLLNEGSARDLRSLQRIGPKKAQLIVGWRELHGPFSQVEDLERVEGITGKQMESFLKANILGLAAGQRC

SEQ ID NO: 452 - protein, 80 aa, Homo sapiens
ESPYGETISPEDAPESISKAVASLPPEQMFELMKQMKLCVQNSPQEARNMLLQNPQLAYALLQAQVVMRIVDPEIALKIL

SEQ ID NO: 453 - protein, 80 aa, Homo sapiens
AGPLHKGKKAVNKDSLEYRLRRERNNIAVRKSRDKAKRRILETQQKVLEYMAENERLRSRVEQLTQELDTLRNLFRQIPE

SEQ ID NO: 454 - protein, 80 aa, Homo sapiens
IRIVNGKPKKVRKPRTIYSSFQLAALQRRFQKTQYLALPERAELAASLGLTQTQVKIWFQNRRSKFKKMWKSGEIPSEQH

SEQ ID NO: 455 - protein, 80 aa, Homo sapiens
TVYQFCSPSCWTKFQRTSPEGGIHLSCHYCHSLFSGKPEVLDWQDQVFQFCCRDCCEDFKRLRGVVSQCEHCRQEKLLHE

SEQ ID NO: 456 - protein, 80 aa, Homo sapiens
TMVDTEMPFWPTNFGISSVDLSVMEDHSHSFDIKPFTTVDFSSISTPHYEDIPFTRTDPVVADYKYDLKLQEYQSAIKVE

SEQ ID NO: 457 - protein, 80 aa, Homo sapiens
GRHHAELLKPRCSACDEIIFADECTEAEGRHWHMKHFCCLECETVLGGQRYIMKDGRPFCCGCFESLYAEYCETCGEHIG

SEQ ID NO: 458 - protein, 80 aa, Homo sapiens
DPDKESPGCKRRRTRTNFTGWQLEELEKAFNESHYPDVFMREALALRLDLVESRVQVWFQNRRAKWRKKENTKKGPGRPA

SEQ ID NO: 459 - protein, 80 aa, Homo sapiens
TEQPTPRQKKPRRSRTIFTELQLMGLEKKFQKQKYLSTPDRLDLAQSLGLTQLQVKTWYQNRRMKWKKMVLKGGQEAPTK

SEQ ID NO: 460 - protein, 80 aa, Homo sapiens
SMELAKNKSKKRRNRTTFSTFQLEELEKVFQKTHYPDVYAREQLALRTDLTEARVQVWFQNRRAKWRKRERYGKIQEGRN

SEQ ID NO: 461 - protein, 80 aa, Homo sapiens
GGGGGAGPVVVVRQRQAANARERDRTQSVNTAFTALRTLIPTEPVDRKLSKIETVRLASSYIAHLANVLLLGDSADDGQP

SEQ ID NO: 462 - protein, 80 aa, Homo sapiens
IDDTVEGITGNLFEVYLKPYFLEAYRPIRKGDIFLVRGGMRAVEFKVVETDPSPYCIVAPDTVIHCEGEPIKREDEEESL

SEQ ID NO: 463 - protein, 80 aa, Homo sapiens
SALNQTKKRKKRRHRTIFTSYQLEELEKAFNEAHYPDVYAREMLAMKTELPEDRIQVWFQNRRAKWRKREKCWGRSSVMA

SEQ ID NO: 464 - protein, 80 aa, Homo sapiens
DGLPWGAAPGRARKKRKPYTKQQIAELENEFLVNEFINRQKRKELSNRLNLSDQQVKIWFQNRRMKKKRVVLREQALALY

SEQ ID NO: 465 - protein, 80 aa, Homo sapiens
GGGGSGKTRTKDKYRVVYTDHQRLELEKEFHYSRYITIRRKSELAANLGLTERQVKIWFQNRRAKERKVNKKKQQQQQPP

SEQ ID NO: 466 - protein, 80 aa, Homo sapiens
TRAGGLALGRSEASPENAARERSRVRTLRQAFLALQAALPAVPPDTKLSKLDVLVLAASYIAHLTRTLGHELPGPAWPPF

SEQ ID NO: 467 - protein, 80 aa, Homo sapiens
KCDSNVSSSKKRRHRTTFTSLQLEELEKVFQKTHYPDVYVREQLALRTELTEARVQVWFQNRRAKWRKRERYGQIQQAKS

SEQ ID NO: 468 - protein, 80 aa, Homo sapiens
NAANWLTAKSGRKKRCPYTKHQTLELEKEFLFNMYLTRERRLEISRSVHLTDRQVKIWFQNRRMKLKKMNRENRIRELTA

SEQ ID NO: 469 - protein, 80 aa, Homo sapiens
LSEEEQPKKKHRRNRTTFTTYQLHELERAFEKSHYPDVYSREELAGKVNLPEVRVQVWFQNRRAKWRRQEKLEVSSMKLQ

SEQ ID NO: 470 - protein, 80 aa, Homo sapiens
HMAGLAEYPMQGELASAISSGKKKRKRCGMCAPCRRRINCEQCSSCRNRKTGHQICKFRKCEELKKKPSAALEKVMLPTG

SEQ ID NO: 471 - protein, 80 aa, Homo sapiens
SITKHPSTWSVEAVVLFLKQTDPLALCPLVDLFRSHEIDGKALLLLTSDVLLKHLGVKLGTAVKLCYYIDRLKQGKCFEN

SEQ ID NO: 472 - protein, 80 aa, Homo sapiens
ACRRKREFIPDEKKDAMYWEKRRKNNEAAKRSREKRRLNDLVLENKLIALGEENATLKAELLSLKLKFGLISSTAYAQEI

SEQ ID NO: 473 - protein, 80 aa, Homo sapiens
EIRFNGKGKKIRKPRTIYSSLQLQALNHRFQQTQYLALPERAELAASLGLTQTQVKIWFQNKRSKFKKLLKQGSNPHESD

SEQ ID NO: 474 - protein, 80 aa, Homo sapiens
GLHGTRQEEMIDHRLTDREWAEEWKHLDHLLNCIMDMVEKTRRSLTVLRRCQEADREELNYWIRRYSDAEDLKKGGGSSS

SEQ ID NO: 475 - protein, 80 aa, Homo sapiens
ELSAVGERVFAAEALLKRRIRKGRMEYLVKWKGWSQKYSTWEPEENILDARLLAAFEEREREMELYGPKKRGPKPKTFLL

SEQ ID NO: 476 - protein, 80 aa, Homo sapiens
AREKSAGKRGPDRGSPEYRQRRERNNIAVRKSRDKAKRRNQEMQQKLVELSAENEKLHQRVEQLTRDLAGLRQFFKQLPS

SEQ ID NO: 477 - protein, 80 aa, Homo sapiens
SGGCDNLIKLWKEEEDGQWKEEQKLEAHSDWVRDVAWAPSIGLPTSTIASCSQDGRVFIWTCDDASSNTWSPKLLHKFND

SEQ ID NO: 478 - protein, 80 aa, Homo sapiens
VKGVDLDAPGSINGVPLLEVDLDSFEDKPWRKPGADLSDYFNYGFNEDTWKAYCEKQKRIRMGLEVIPVTSTTNKITAED

SEQ ID NO: 479 - protein, 80 aa, Homo sapiens
KADSESNKGKKRRNRTTFTSYQLEELEKVFQKTHYPDVYAREQLAMRTDLTEARVQVWFQNRRAKWRKRERFGQMQQVRT

SEQ ID NO: 480 - protein, 80 aa, Homo sapiens
TAKQREAEATAKRPRTTITAKQLETLKSAYNTSPKPARHVREQLSSETGLDMRVVQVWFQNRRAKEKRLKKDAGRQRWGQ

SEQ ID NO: 481 - protein, 80 aa, Homo sapiens
GRHHAECLKPRCAACDEIIFADECTEAEGRHWHMKHFCCFECETVLGGQRYIMKEGRPYCCHCFESLYAEYCDTCAQHIG

SEQ ID NO: 482 - protein, 80 aa, Homo sapiens
IIGGDRPDEFLQVKNVLKDGPAAQDGKIAPGDVIVDINGNCVLGHTHADVVQMFQLVPVNQYVNLTLCRGYPLPDDSEDP

SEQ ID NO: 483 - protein, 80 aa, Homo sapiens
CCPECDTRVTSQCLDQNGHKLYRSGDNWTHSCQQCRCLEGEVDCWPLTCPNLSCEYTAILEGECCPRCVSDPCLADNITY

SEQ ID NO: 484 - protein, 80 aa, Homo sapiens
LNSEEKKKRKQRRNRTTFNSSQLQALERVFERTHYPDAFVREDLARRVNLTEARVQVWFQNRRAKFRRNERAMLANKNAS

SEQ ID NO: 485 - protein, 80 aa, Homo sapiens
GLNGGYQDELVDHRLTEREWADEWKHLDHALNCIMEMVEKTRRSMAVLRRCQESDREELNYWKRRYNENTELRKTGTELV

SEQ ID NO: 486 - protein, 80 aa, Homo sapiens
GPGEEAPKKKHRRNRTTFTTYQLHQLERAFEASHYPDVYSREELAAKVHLPEVRVQVWFQNRRAKWRRQERLESGSGAVA

SEQ ID NO: 487 - protein, 80 aa, Homo sapiens
VRMVNGKPKKVRKPRTIYSSYQLAALQRRFQKAQYLALPERAELAAQLGLTQTQVKIWFQNRRSKFKKLYKNGEVPLEHS

SEQ ID NO: 488 - protein, 80 aa, Homo sapiens
EVRFNGKGKKIRKPRTIYSSLQLQALNRRFQQTQYLALPERAELAASLGLTQTQVKIWFQNKRSKFKKLMKQGGAALEGS

SEQ ID NO: 489 - protein, 80 aa, Homo sapiens
GRSEQPKARQRRKPRVLFSQAQVLALERRFKQQRYLSAPEREHLASALQLTSTQVKIWFQNRRYKCKRQRQDKSLELAGH

SEQ ID NO: 490 - protein, 80 aa, Homo sapiens
LPRTLGELQLYRILQKANLLSYFDAFIQQGGDDVQQLCEAGEEEFLEIMALVGMASKPLHVRRLQKALRDWVTNPGLFNQ

SEQ ID NO: 491 - protein, 80 aa, Homo sapiens
NLSLDEDIQKWTVDDVHSFIRSLPGCSDYAQVFKDHAIDGETLPLLTEEHLRGTMGLKLGPALKIQSQVSQHVGSMFYKK

SEQ ID NO: 492 - protein, 80 aa, Homo sapiens
SPEDGSLKKKQRRQRTHFTSQQLQELEATFQRNRYPDMSTREEIAVWTNLTEARVRVWFKNRRAKWRKRERSQQAELCKG

SEQ ID NO: 493 - protein, 80 aa, Homo sapiens
SNLLVSASDDKTLKIWDVSSGKCLKTLKGHSNYVFCCNFNPQSNLIVSGSFDESVRIWDVKTGKCLKTLPAHSDPVSAVH

SEQ ID NO: 494 - protein, 80 aa, Homo sapiens
GNYKSEVNSKPRKERTAFTKEQIRELEAEFAHHNYLTRLRRYEIAVNLDLTERQVKVWFQNRRMKWKRVKGGQQGAAARE

SEQ ID NO: 495 - protein, 80 aa, Homo sapiens
LPRTLGELQLYRVLQRANLLSYYETFIQQGGDDVQQLCEAGEEEFLEIMALVGMATKPLHVRRLQKALREWATNPGLFSQ

SEQ ID NO: 496 - protein, 80 aa, Homo sapiens
PEEPTIGDIYNGKVTSIMQFGCFVQLEGLRKRWEGLVHISELRREGRVANVADVVSKGQRVKVKVLSFTGTKTSLSMKDV

SEQ ID NO: 497 - protein, 80 aa, Homo sapiens
YAFNHPFSINNLMSSEQQHHHSHHHHQPHKMDLKAYEQVMHYPGYGSPMPGSLAMGPVTNKTGLDASPLAADTSYYQGVY

SEQ ID NO: 498 - protein, 80 aa, Homo sapiens
TAAAGPAPPTAPEPAGASSEPEAGDWRPEMSPCSNVVVTDVTSNLLTVTIKEFCNPEDFEKVAAGVAGAAGGGGSIGASK

SEQ ID NO: 499 - protein, 80 aa, Homo sapiens
FLLHNALARKPKRIRTAFSPSQLLRLEHAFEKNHYVVGAERKQLAHSLSLTETQVKVWFQNRRTKFKRQKLEEEGSDSQQ

SEQ ID NO: 500 - protein, 80 aa, Homo sapiens
KRIALYIGNLTWWTTDEDLTEAVHSLGVNDILEIKFFENRANGQSKGFALVGVGSEASSKKLMDLLPKRELHGQNPVVTP

SEQ ID NO: 501 - protein, 80 aa, Homo sapiens
SGAPWYPINSRSRKKRKPYSKLQLAELEGEFLVNEFITRQRRRELSDRLNLSDQQVKIWFQNRRMKKKRLLLREQALSFF

SEQ ID NO: 502 - protein, 80 aa, Homo sapiens
SDNLYPESITSRDCVQLGPPSEGELVELRWTDGNLYKAKFISSVTSHIYQVEFEDGSQLTVKRGDIFTLEEELPKRVRSR

SEQ ID NO: 503 - protein, 80 aa, Homo sapiens
GIPASKVSKWSTDEVSEFIQSLPGCEEHGKVFKDEQIDGEAFLLMTQTDIVKIMSIKLGPALKIFNSILMFKAAEKNSHN

SEQ ID NO: 504 - protein, 80 aa, Homo sapiens
EPSGLHEKRKQRRIRTTFTSAQLKELERVFAETHYPDIYTREELALKIDLTEARVQVWFQNRRAKFRKQERAASAKGAAG

SEQ ID NO: 505 - protein, 80 aa, Homo sapiens
LLLHGPFARKPKRIRTAFSPSQLLRLERAFEKNHYVVGAERKQLAGSLSLSETQVKVWFQNRRTKYKRQKLEEEGPESEQ

SEQ ID NO: 506 - protein, 80 aa, Homo sapiens
SSGNDDDLTIPRAAINKMIKETLPNVRVANDARELVVNCCTEFIHLISSEANEICNKSEKKTISPEHVIQALESLGFGSY

SEQ ID NO: 507 - protein, 80 aa, Homo sapiens
ERRPQAPAKKLRKPRTIYSSLQLQHLNQRFQHTQYLALPERAQLAAQLGLTQTQVKIWFQNKRSKYKKLLKQNSGGQEGD

SEQ ID NO: 508 - protein, 80 aa, Homo sapiens
NVQDRVKRPMNAFIVWSRDQRRKMALENPRMRNSEISKQLGYQWKMLTEAEKWPFFQEAQKLQAMHREKYPNYKYRPRRK

SEQ ID NO: 509 - protein, 80 aa, Homo sapiens
EITRLAVWAAVQAVERKLEAQAMRLLTLEGRTGTNEKKIADCEKTAVEFANHLESKWVVLGTLLQEYGLLQRRLENMENL

SEQ ID NO: 510 - protein, 80 aa, Homo sapiens
CEKDIDECSEGIIECHNHSRCVNLPGWYHCECRSGFHDDGTYSLSGESCIDIDECALRTHTCWNDSACINLAGGFDCLCP

SEQ ID NO: 511 - protein, 80 aa, Homo sapiens
AAISLWTVVAAVQAIERKVEIHSRRLLHLEGRTGTAEKKLASCEKTVTELGNQLEGKWAVLGTLLQEYGLLQRRLENLEN

SEQ ID NO: 512 - protein, 80 aa, Homo sapiens
GQNRPLIKPKRRLSAARRAGTSCANCQTTTTTLWRRNANGDPVCNACGLYYKLHNINRPLTMKKEGIQTRNRKMSSKSKK

SEQ ID NO: 513 - protein, 80 aa, Homo sapiens
HAELPGKHCRRRKARTVFSDSQLSGLEKRFEIQRYLSTPERVELATALSLSETQVKTWFQNRRMKHKKQLRKSQDEPKAP

SEQ ID NO: 514 - protein, 80 aa, Homo sapiens
QDATVYVGGLDEKVSEPLLWELFLQAGPVVNTHMPKDRVTGQHQGYGFVEFLSEEDADYAIKIMNMIKLYGKPIRVNKAS

SEQ ID NO: 515 - protein, 80 aa, Homo sapiens
PIDNDAEGVWSPDIEQSFQEALAIYPPCGRRKIILSDEGKMYGRNELIARYIKLRTGKTRTRKQVSSHIQVLARRKSRDF

SEQ ID NO: 516 - protein, 80 aa, Homo sapiens
GLDNDAEGVWSPDIEQSFQEALAIYPPCGRRKIILSDEGKMYGRNELIARYIKLRTGKTRTRKQVSSHIQVLARKKVREY

SEQ ID NO: 517 - protein, 80 aa, Homo sapiens
DSVGTPQSNGGMRLHDFVSKTVIKPESCVPCGKRIKFGKLSLKCRDCRVVSHPECRDRCPLPCIPTLIGTPVKIGEGMLA

SEQ ID NO: 518 - protein, 80 aa, Homo sapiens
SAPHSMTASSSSVSSPSPGLPRRSAPPSPLCRSLSPGTGGGVRGGVGYLSRGDPVRVLARRVRPDGSVQYLVEWGGGGIF

SEQ ID NO: 519 - protein, 80 aa, Homo sapiens
GDPHYSFNHPFSINNLMSSSEQQHKLDFKAYEQALQYSPYGSTLPASLPLGSASVTTRSPIEPSALEPAYYQGVYSRPVL

SEQ ID NO: 520 - protein, 80 aa, Homo sapiens
GQNRPLIKPKRRLSAARRAGTCCANCQTTTTTLWRRNANGDPVCNACGLYYKLHNVNRPLTMKKEGIQTRNRKMSNKSKK

SEQ ID NO: 521 - protein, 80 aa, Homo sapiens
DSLSGSSLYSTSANLPVMGHEKFPSDLDLDMFNGSLECDMESIIRSELMDADGLDFNFDSLISTQNVVGLNVGNFTGAKQ

SEQ ID NO: 522 - protein, 80 aa, Homo sapiens
TEISLWTVVAAIQAVEKKMESQAARLQSLEGRTGTAEKKLADCEKMAVEFGNQLEGKWAVLGTLLQEYGLLQRRLENVEN

SEQ ID NO: 523 - protein, 80 aa, Homo sapiens
MDSGTRRKNATRETTSTLKAWLQEHRKNPYPTKGEKIMLAIITKMTLTQVSTWFANARRRLKKENKMTWPPRNKCADEKR

SEQ ID NO: 524 - protein, 80 aa, Homo sapiens
NIEKQIYLPSTRAKTSIVWHFFHVDPQYTWRAICNLCEKSVSRGKPGSHLGTSTLQRHLQARHSPHWTRANKFGVASGEE

SEQ ID NO: 525 - protein, 80 aa, Homo sapiens
AKQNDDSEAGAKRPRTTITAKQLETLKNAYKNSPKPARHVREQLSSETGLDMRVVQVWFQNRRAKEKRLKKDAGRHRWGQ

SEQ ID NO: 526 - protein, 80 aa, Homo sapiens
DALSYLDQVKLQFGSQPQVYNDFLDIMKEFKSQSIDTPGVISRVSQLFKGHPDLIMGFNTFLPPGYKIEVQTNDMVNVTT

SEQ ID NO: 527 - protein, 80 aa, Homo sapiens
DDHTVCLWDINAGPKEGKIVDAKAIFTGHSAVVEDVAWHLLHESLFGSVADDQKLMIWDTRSNTTSKPSHLVDAHTAEVN

SEQ ID NO: 528 - protein, 80 aa, Homo sapiens
GSILLDKDGKRKHTRPTFSGQQIFALEKTFEQTKYLAGPERARLAYSLGMTESQVKVWFQNRRTKWRKKHAAEMATAKKK

SEQ ID NO: 529 - protein, 80 aa, Homo sapiens
DPTALVEAIVEEVACPICMTFLREPMSIDCGHSFCHSCLSGLWEIPGESQNWGYTCPLCRAPVQPRNLRPNWQLANVVEK

SEQ ID NO: 530 - protein, 80 aa, Homo sapiens
QSLPKKVSLSSDTTRKPLEIRSPSAESKKPKWVPPAASGGSRSSSSPLVVVSVKSPNQSLRLGLSRLARVKPLHPNATST

SEQ ID NO: 531 - protein, 80 aa, Homo sapiens
AKSSQRKQRDCVNQCKSKPGLSTSIPLRMSSYTFKRPVTRITPHPGNEVRYHQWEESLEKPQQVCWQRRLQGLQAYSSAG

SEQ ID NO: 532 - protein, 80 aa, Homo sapiens
VRMVNGKPKKVRKPRTIYSSFQLAALQRRFQKTQYLALPERAELAASLGLTQTQVKIWFQNKRSKIKKIMKNGEMPPEHS

SEQ ID NO: 533 - protein, 80 aa, Homo sapiens
LQCNNHACGWDGGDCSLNFNDPWKNCTQSLQCWKYFSDGHCDSQCNSAGCLFDGFDCQRAEGQCNPLYDQYCKDHFSDGH

SEQ ID NO: 534 - protein, 80 aa, Homo sapiens
ETWVEEDELFQVQAAPDEDSTTNITKKQKWTVEESEWVKAGVQKYGEGNWAAISKNYPFVNRTAVMIKDRWRTMKRLGMN

SEQ ID NO: 535 - protein, 80 aa, Homo sapiens
AEISLWTVVAAIQAVERKVDAQASQLLNLEGRTGTAEKKLADCEKTAVEFGNHMESKWAVLGTLLQEYGLLQRRLENLEN

SEQ ID NO: 536 - protein, 80 aa, Homo sapiens
LEKRTLFRLDLVPINRSVGLKAKPTKPVTEVLRPVVARYGLDLSGLLVRLSGEKEPLDLGAPISSLDGQRVVLEEKDPSR

SEQ ID NO: 537 - protein, 80 aa, Homo sapiens
PNCLSSSMQLPHGGGRHQELVRFRDVAVVFSPEEWDHLTPEQRNLYKDVMLDNCKYLASLGNWTYKAHVMSSLKQGKEPW

SEQ ID NO: 538 - protein, 80 aa, Homo sapiens
DDYKEGDLRIMPESSESPPTEREPGGVVDGLIGKHVEYTKEDGSKRIGMVIHQVEAKPSVYFIKFDDDFHIYVYDLVKKS

SEQ ID NO: 539 - protein, 80 aa, Homo sapiens
SEPDLPLKRKQRRSRTTFTAEQLEELEKAFERTHYPDIYTREELAQRTKLTEARVQVWFSNRRARWRKQAGANQLAAFNH

SEQ ID NO: 540 - protein, 80 aa, Homo sapiens
AGGVLDKDGKKKHSRPTFSGQQIFALEKTFEQTKYLAGPERARLAYSLGMTESQVKVWFQNRRTKWRKRHAVEMASAKKK

SEQ ID NO: 541 - protein, 80 aa, Homo sapiens
DVMSFSVTVTTIPASQAMNPSSHGQTIPVQAFSEENSIEGTPSKCYCRLKAMIMCKGCGAFCHDDCIGPSKLCVSCLVVR

SEQ ID NO: 542 - protein, 80 aa, Homo sapiens
GGYSSVSSCNGYGRMGLLHQEKLPSDLDGMFIERLDCDMESIIRNDLMDGDTLDFNFDNVLPNQSFPHSVKTTTHSWVSG

SEQ ID NO: 543 - protein, 80 aa, Homo sapiens
GGSPTGFGCKSRPKARSSTGRECVNCGATSTPLWRRDGTGHYLCNACGLYHKMNGQNRPLIKPKRRLSAARRAGTSCANC

SEQ ID NO: 544 - protein, 80 aa, Homo sapiens
GQNRPLIRPKKRLIVSKRAGTQCTNCQTTTTTLWRRNASGDPVCNACGLYYKLHQVNRPLTMRKDGIQTRNRKASGKGKK

SEQ ID NO: 545 - protein, 80 aa, Homo sapiens
PVALLRKQNFQPTAQQQLTKPAKITCANCKKPLQKGQTAYQRKGSAHLFCSTTCLSSFSHKRTQNTRSIICKKDASTKKA

SEQ ID NO: 546 - protein, 80 aa, Homo sapiens
TEITLWTVVAAIQALEKKVDSCLTRLLTLEGRTGTAEKKLADCEKTAVEFGNQLEGKWAVLGTLLQEYGLLQRRLENVEN

SEQ ID NO: 547 - protein, 80 aa, Homo sapiens
KKQRGRPSSQPRRNIVGCRISHGWKEGDEPITQWKGTVLDQVPINPSLYLVKYDGIDCVYGLELHRDERVLSLKILSDRV

SEQ ID NO: 548 - protein, 80 aa, Homo sapiens
WTCDLDDDCGDRSDESASCAYPTCFPLTQFTCNNGRCININWRCDNDNDCGDNSDEAGCSHSCSSTQFKCNSGRCIPEHW

SEQ ID NO: 549 - protein, 80 aa, Homo sapiens
PKGAAAPSASQRRKRTSFSAEQLQLLELVFRRTRYPDIHLRERLAALTLLPESRIQVWFQNRRAKSRRQSGKSFQPLARP

SEQ ID NO: 550 - protein, 80 aa, Homo sapiens
KIKYDWYQTESQVVITLMIKNVQKNDVNVEFSEKELSALVKLPSGEDYNLKLELLHPIIPEQSTFKVLSTKIEIKLKKPE

SEQ ID NO: 551 - protein, 80 aa, Homo sapiens
DPSKEVEYVCELCKGAAPPDSPVVYSDRAGYNKQWHPTCFVCAKCSEPLVDLIYFWKDGAPWCGRHYCESLRPRCSGCDE

SEQ ID NO: 552 - protein, 80 aa, Homo sapiens
GSGAGKAKKSVDKNSNEYRVRRERNNIAVRKSRDKAKQRNVETQQKVLELTSDNDRLRKRVEQLSRELDTLRGIFRQLPE

SEQ ID NO: 553 - protein, 80 aa, Homo sapiens
GPASSFTPKQRSKARSCSEGRECVNCGATATPLWRRDGTGHYLCNACGLYHKMNGQNRPLIKPKRRLSAARRAGTCCANC

SEQ ID NO: 554 - protein, 80 aa, Homo sapiens
KPSDHIKRPMNAFMVWSRGQRRKMAQENPKMHNSEISKRLGAEWKLLSEAEKRPYIDEAKRLRAQHMKEHPDYKYRPRRK

SEQ ID NO: 555 - protein, 80 aa, Homo sapiens
LYSGFQQTADKCSVCGHLIMEMILQALGKSYHPGCFRCSVCNECLDGVPFTVDVENNIYCVRDYHTVFAPKCASCARPIL

SEQ ID NO: 556 - protein, 80 aa, Homo sapiens
HPSQDLVFSASPDATIRIWSVPNASCVQVVRAHESAVTGLSLHATGDYLLSSSDDQYWAFSDIQTGRVLTKVTDETSGCS

SEQ ID NO: 557 - protein, 80 aa, Homo sapiens
ELSAVGERVFAAESIIKRRIRKGRIEYLVKWKGWAIKYSTWEPEENILDSRLIAAFEQKERERELYGPKKRGPKPKTFLL

SEQ ID NO: 558 - protein, 80 aa, Homo sapiens
RTGSDSKSGKPRRARTAFTYEQLVALENKFKATRYLSVCERLNLALSLSLTETQVKIWFQNRRTKWKKQNPGADTSAPTG

SEQ ID NO: 559 - protein, 80 aa, Homo sapiens
VWDLSKIGEEQSPEDAEDGPPELLFIHGGHTAKISDFSWNPNEPWVICSVSEDNIMQVWQMAENIYNDEDPEGSVDPEGQ

SEQ ID NO: 560 - protein, 80 aa, Homo sapiens
ERCTPAGGGAEPRKLSRTPKCARCRNHGVVSCLKGHKRFCRWRDCQCANCLLVVERQRVMAAQVALRRQQATEDKKGLSG

SEQ ID NO: 561 - protein, 80 aa, Homo sapiens
SQPGALIPGDPQAMSQPNRGPSPFSPVQLHQLRAQILAYKMLARGQPLPETLQLAVQGKRTLPGLQQQQQQQQQQQQQQQ

SEQ ID NO: 562 - protein, 573 aa, Synthetic construct; identical to SEQ ID NO: 89

SEQ ID NO: 563 - protein, 441 aa, Homo sapiens
MSEREVSTAPAGTDMPAAKKQKLSSDENSNPDLSGDENDDAVSIESGTNTERPDTPTNTPNAPGRKSWGKGKWKSKKCKYSFKCVNSLKEDHNQPLFGVQFNWHSKEGDPLVFATVGSNRVTLYECHSQGEIRLLQSYVDADADENFYTCAWTYDSNTSHPLLAVAGSRGIIRIINPITMQCIKHYVGHGNAINELKFHPRDPNLLLSVSKDHALRLWNIQTDTLVAIFGGVEGHRDEVLSADYDLLGEKIMSCGMDHSLKLWRINSKRMMNAIKESYDYNPNKTNRPFISQKIHFPDFSTRDIHRNYVDCVRWLGDLILSKSCENAIVCWKPGKMEDDIDKIKPSESNVTILGRFDYSQCDIWYMRFSMDFWQKMLALGNQVGKLYVWDLEVEDPHKAKCTTLTHHKCGAAIRQTSFSRDSSILIAVCDDASIWRWDRLR

SEQ ID NO: 564 - protein, 485 aa, Homo sapiens
MPAMVEKGPEVSGKRRGRNNAAASASAAAASAAASAACASPAATAASGAAASSASAAAASAAAAPNNGQNKSLAAAAPNGNSSSNSWEEGSSGSSSDEEHGGGGMRVGPQYQAVVPDFDPAKLARRSQERDNLGMLVWSPNQNLSEAKLDEYIAIAKEKHGYNMEQALGMLFWHKHNIEKSLADLPNFTPFPDEWTVEDKVLFEQAFSFHGKTFHRIQQMLPDKSIASLVKFYYSWKKTRTKTSVMDRHARKQKREREESEDELEEANGNNPIDIEVDQNKESKKEVPPTETVPQVKKEKHSTQAKNRAKRKPPKGMFLSQEDVEAVSANATAATTVLRQLDMELVSVKRQIQNIKQTNSALKEKLDGGIEPYRLPEVIQKCNARWTTEEQLLAVQAIRKYGRDFQAISDVIGNKSVVQVKNFFVNYRRRFNIDEVLQEWEAEHGKEETNGPSNQKPVKSPDNSIKMPEEEDEAPVLDVRYASAS

SEQ ID NO: 565 - protein, 77 aa, Synthetic construct
TGRTLVTFKDVFVDFTREEWKLLDTAQQIVYRNVMLENYKNLVSLGYQLTKPDVILRLEKGEEPLEINLWITKFVKD

SEQ ID NO: 566 - protein, 120 aa, Synthetic construct
MYPYDVPDYASPKKKRKVGGGASMDAKSLTAWSRTLVTFKDVFVDFTREEWKLLDTAQQIVYRNVMLENYKNLVSLGYQLTKPDVILRLEKGEEPWLVEREIHQETHPDSETAFEIKSSV

SEQ ID NO: 567 - protein, 117 aa, Synthetic construct
ALSPQHSAVTQGSIIKNKEGMDAKSLTAWSRTLVTFKDVFVDFTREEWKLLDTAQQIVYRNVMLENYKNLVSLGYQLTKPDVILRLEKGEEPWLVEREIHQETHPDSETAFEIKSSV

SEQ ID NO: 568 - protein, 62 aa, Synthetic construct
RTLVTFKDVFVDFTREEWKLLDTAQQIVYRNVMLENYKNLVSLGYQLTKPDVILRLEKGEEP

SEQ ID NO: 569 - protein, 98 aa, Synthetic construct
RTLVTFKDVFVDFTREEWKLLDTAQQIVYRNVMLENYKNLVSLGYQLTKPDVILRLEKGEEPWLVEREIHQETHPDSETAFEIKSSVSSRSIFKDKQS

SEQ ID NO: 570 - protein, 99 aa, Synthetic construct
RTLVTFKDVAVDFTQEEWQQLDPAQKIVYRDVMLENYSNLVSVGYQLTKPDVILRLEQKGEEPWLVEEEIHQETHPDSETAFEIKSSVSSRSIFKDKQS

SEQ ID NO: 571 - protein, 95 aa, Synthetic construct
RTLVTFKDVFVDFTREEWKLLDTAQQIVYRNVMLENYKNLVSLGYQLTKPDVILRLEKGEEPWLEEEEVLGSGRAEKNGDIGGQIWKPKDVKESL

SEQ ID NO: 572 - protein, 103 aa, Synthetic construct
MNNSQGRVTFEDVTVNFTQGEWQRLNPEQRNLYRDVMLENYSNLVSVGQGETTKPDVILRLEQGKEPWLVEREIHQETHPDSETAFEIKSSVSSRSIFKDKQS

SEQ ID NO: 573 - protein, 1615 aa, Homo sapiens
MPARTAPARVPTLAVPAISLPDDVRRRLKDLERDSLTEKECVKEKLNLLHEFLQTEIKNQLCDLETKLRKEELSEEGYLAKVKSLLNKDLSLENGAHAYNREVNGRLENGNQARSEARRVGMADANSPPKPLSKPRTPRRSKSDGEAKPEPSPSPRITRKSTRQTTITSHFAKGPAKRKPQEESERAKSDESIKEEDKDQDEKRRRVTSRERVARPLPAEEPERAKSGTRTEKEEERDEKEEKRLRSQTKEPTPKQKLKEEPDREARAGVQADEDEDGDEKDEKKHRSQPKDLAAKRRPEEKEPEKVNPQISDEKDEDEKEEKRRKTTPKEPTEKKMARAKTVMNSKTHPPKCIQCGQYLDDPLKYGQHPPDAVDEPQMLTNEKLSIFDANESGFESYEALPQHKLTCFSVYCKHGHLCPIDTGLIEKNIELFFSGSAKPIYDDDPSLEGGVNGKNLGPINEWWITGFDGGEKALIGFSTSFAEYILMDPSPEYAPIFGLMQEKIYISKIVVEFLQSNSDSTYEDLINKIETTVPPSGLNLNRFTEDSLLRHAQFVVEQVESYDEAGDSDEQPIFLTPCMRDLIKLAGVTLGQRRAQARRQTIRHSTREKDRGPTKATTTKLVYQIFDTFFAEQIEKDDREDKENAFKRRRCGVCEVCQQPECGKCKACKDMVKFGGSGRSKQACQERRCPNMAMKEADDDEEVDDNIPEMPSPKKMHQGKKKKQNKNRISWVGEAVKTDGKKSYYKKVCIDAETLEVGDCVSVIPDDSSKPLYLARVTALWEDSSNGQMFHAHWFCAGTDTVLGATSDPLELFLVDECEDMQLSYIHSKVKVIYKAPSENWAMEGGMDPESLLEGDDGKTYFYQLWYDQDYARFESPPKTQPTEDNKFKFCVSCARLAEMRQKEIPRVLEQLEDLDSRVLYYSATKNGILYRVGDGVYLPPEAFTFNIKLSSPVKRPRKEPVDEDLYPEHYRKYSDYIKGSNLDAPEPYRIGRIKEIFCPKKSNGRPNETDIKIRVNKFYRPENTHKSTPASYHADINLLYWSDEEAVVDFKAVQGRCTVEYGEDLPECVQVYSMGGPNRFYFLEAYNAKSKSFEDPPNHARSPGNKGKGKGKGKGKPKSQACEPSEPEIEIKLPKLRTLDVFSGCGGLSEGFHQAGISDTLWAIEMWDPAAQAFRLNNPGSTVFTEDCNILLKLVMAGETTNSRGQRLPQKGDVEMLCGGPPCQGFSGMNRFNSRTYSKFKNSLVVSFLSYCDYYRPRFFLLENVRNFVSFKRSMVLKLTLRCLVRMGYQCTFGVLQAGQYGVAQTRRRAIILAAAPGEKLPLFPEPLHVFAPRACQLSVVVDDKKFVSNITRLSSGPFRTITVRDTMSDLPEVRNGASALEISYNGEPQSWFQRQLRGAQYQPILRDHICKDMSALVAARMRHIPLAPGSDWRDLPNIEVRLSDGTMARKLRYTHHDRKNGRSSSGALRGVCSCVEAGKACDPAARQFNTLIPWCLPHTGNRHNHWAGLYGRLEWDGFFSTTVTNPEPMGKQGRVLHPEQHRVVSVRECARSQGFPDTYRLFGNILDKHRQVGNAVPPPLAKAIGLEIKLCMLAKARESASAKIKEEEAAKD

SEQ ID NO: 574 - protein, 912 aa, Homo sapiens
MPAMPSSGPGDTSSSAAEREEDRKDGEEQEEPRGKEERQEPSTTARKVGRPGRKRKHPPVESGDTPKDPAVISKSPSMAQDSGASELLPNGDLEKRSEPQPEEGSPAGGQKGGAPAEGEGAAETLPEASRAVENGCCTPKEGRGAPAEAGKEQKETNIESMKMEGSRGRLRGGLGWESSLRQRPMPRLTFQAGDPYYISKRKRDEWLARWKREAEKKAKVIAGMNAVEENQGPGESQKVEEASPPAVQQPTDPASPTVATTPEPVGSDAGDKNATKAGDDEPEYEDGRGFGIGELVWGKLRGFSWWPGRIVSWWMTGRSRAAEGTRWVMWFGDGKFSVVCVEKLMPLSSFCSAFHQATYNKQPMYRKAIYEVLQVASSRAGKLFPVCHDSDESDTAKAVEVQNKPMIEWALGGFQPSGPKGLEPPEEEKNPYKEVYTDMWVEPEAAAYAPPPPAKKPRKSTAEKPKVKEIIDERTRERLVYEVRQKCRNIEDICISCGSLNVTLEHPLFVGGMCQNCKNCFLECAYQYDDDGYQSYCTICCGGREVLMCGNNNCCRCFCVECVDLLVGPGAAQAAIKEDPWNCYMCGHKGTYGLLRRREDWPSRLQMFFANNHDQEFDPPKVYPPVPAEKRKPIRVLSLFDGIATGLLVLKDLGIQVDRYIASEVCEDSITVGMVRHQGKIMYVGDVRSVTQKHIQEWGPFDLVIGGSPCNDLSIVNPARKGLYEGTGRLFFEFYRLLHDARPKEGDDRPFFWLFENVVAMGVSDKRDISRFLESNPVMIDAKEVSAAHRARYFWGNLPGMNRPLASTVNDKLELQECLEHGRIAKFSKVRTITTRSNSIKQGKDQHFPVFMNEKEDILWCTEMERVFGFPVHYTDVSNMSRLARQRLLGRSWSVPVIRHLFAPLKEYFACV

SEQ ID NO: 575 - protein, 301 aa, Homo sapiens
NHDQEFDPPKVYPPVPAEKRKPIRVLSLFDGIATGLLVLKDLGIQVDRYIASEVCEDSITVGMVRHQGKIMYVGDVRSVTQKHIQEWGPFDLVIGGSPCNDLSIVNPARKGLYEGTGRLFFEFYRLLHDARPKEGDDRPFFWLFENVVAMGVSDKRDISRFLESNPVMIDAKEVSAAHRARYFWGNLPGMNRPLASTVNDKLELQECLEHGRIAKFSKVRTITTRSNSIKQGKDQHFPVFMNEKEDILWCTEMERVFGFPVHYTDVSNMSRLARQRLLGRSWSVPVIRHLFAPLKEYFACV

SEQ ID NO: 576 - protein, 853 aa, Homo sapiens
MKGDTRHLNGEEDAGGREDSILVNGACSDQSSDSPPILEAIRTPEIRGRRSSSRLSKREVSSLLSYTQDLTGDGDGEDGDGSDTPVMPKLFRETRTRSESPAVRTRNNNSVSSRERHRPSPRSTRGRQGRNHVDESPVEFPATRSLRRRATASAGTPWPSPPSSYLTIDLTDDTEDTHGTPQSSSTPYARLAQDSQQGGMESPQVEADSGDGDSSEYQDGKEFGIGDLVWGKIKGFSWWPAMVVSWKATSKRQAMSGMRWVQWFGDGKFSEVSADKLVALGLFSQHFNLATFNKLVSYRKAMYHALEKARVRAGKTFPSSPGDSLEDQLKPMLEWAHGGFKPTGIEGLKPNNTQPVVNKSKVRRAGSRKLESRKYENKTRRRTADDSATSDYCPAPKRLKTNCYNNGKDRGDEDQSREQMASDVANNKSSLEDGCLSCGRKNPVSFHPLFEGGLCQTCRDRFLELFYMYDDDGYQSYCTVCCEGRELLLCSNTSCCRCFCVECLEVLVGTGTAAEAKLQEPWSCYMCLPQRCHGVLRRRKDWNVRLQAFFTSDTGLEYEAPKLYPAIPAARRRPIRVLSLFDGIATGYLVLKELGIKVGKYVASEVCEESIAVGTVKHEGNIKYVNDVRNITKKNIEEWGPFDLVIGGSPCNDLSNVNPARKGLYEGTGRLFFEFYHLLNYSRPKEGDDRPFFWMFENVVAMKVGDKRDISRFLECNPVMIDAIKVSAAHRARYFWGNLPGMNRPVIASKNDKLELQDCLEYNRIAKLKKVQTITTKSNSIKQGKNQLFPVVMNGKEDVLWCTELERIFGFPVHYTDVSNMGRGARQKLLGRSWSVPVIRHLFAPLKDYFACE

SEQ ID NO: 577 - protein, 740 aa, Mus musculus
MRGGSRHLSNEEDVSGCEDCIIISGTCSDQSSDPKTVPLTQVLEAVCTVENRGCRTSSQPSKRKASSLISYVQDLTGDGDEDRDGEVGGSSGSGTPVMPQLFCETRIPSKTPAPLSWQANTSASTPWLSPASPYPIIDLTDEDVIPQSISTPSVDWSQDSHQEGMDTTQVDAESRDGGNIEYQVSADKLLLSQSCILAAFYKLVPYRESIYRTLEKARVRAGKACPSSPGESLEDQLKPMLEWAHGGFKPTGIEGLKPNKKQPENKSRRRTTNDPAASESSPPKRLKTNSYGGKDRGEDEESREQMASDVTNNKGNLEDHCLSCGRKDPVSFHPLFEGGLCQSCRDRFLELFYMYDEDGYQSYCTVCCEGRELLLCSNTSCCRCFCVECLEVLVGAGTAEDVKLQEPWSCYMCLPQRCHGVLRRRKDWNMRLQDFFTTDPDLEEFEPPKLYPAIPAAKRRPIRVLSLFDGIATGYLVLKELGIKVEKYIASEVCAESIAVGTVKHEGQIKYVDDIRNITKEHIDEWGPFDLVIGGSPCNDLSCVNPVRKGLFEGTGRLFFEFYRLLNYSCPEEEDDRPFFWMFENVVAMEVGDKRDISRFLECNPVMIDAIKVSAAHRARYFWGNLPGMNRPVMASKNDKLELQDCLEFSRTAKLKKVQTITTKSNSIRQGKNQLFPVVMNGKDDVLWCTELERIFGFPEHYTDVSNMGRGARQKLLGRSWSVPVIRHLFAPLKDHFACE

SEQ ID NO: 578 - protein, 387 aa, Homo sapiens
MAAIPALDPEAEPSMDVILVGSSELSSSVSPGTGRDLIAYEVKANQRNIEDICICCGSLQVHTQHPLFEGGICAPCKDKFLDALFLYDDDGYQSYCSICCSGETLLICGNPDCTRCYCFECVDSLVGPGTSGKVHAMSNWVCYLCLPSSRSGLLQRRRKWRSQLKAFYDRESENPLEMFETVPVWRRQPVRVLSLFEDIKKELTSLGFLESGSDPGQLKHVVDVTDTVRKDVEEWGPFDLVYGATPPLGHTCDRPPSWYLFQFHRLLQYARPKPGSPRPFFWMFVDNLVLNKEDLDVASRFLEMEPVTIPDVHGGSLQNAVRVWSNIPAIRSSRHWALVSEEELSLLAQNKQSSKLAAKWPTKLVKNCFLPLREYFKYFSTELTSSL

SEQ ID NO: 579 - protein, 213 aa, Homo sapiens
NPLEMFETVPVWRRQPVRVLSLFEDIKKELTSLGFLESGSDPGQLKHVVDVTDTVRKDVEEWGPFDLVYGATPPLGHTCDRPPSWYLFQFHRLLQYARPKPGSPRPFFWMFVDNLVLNKEDLDVASRFLEMEPVTIPDVHGGSLQNAVRVWSNIPAIRSRHWALVSEEELSLLAQNKQSSKLAAKWPTKLVKNCFLPLREYFKYFSTELTSSL

SEQ ID NO: 580 - protein, 421 aa, Mus musculus
MGSRETPSSCSKTLETLDLETSDSSSPDADSPLEEQWLKSSPALKEDSVDVVLEDCKEPLSPSSPPTGREMIRYEVKVNRRSIEDICLCCGTLQVYTRHPLFEGGLCAPCKDKFLESLFLYDDDGHQSYCTICCSGGTLFICESPDCTRCYCFECVDILVGPGTSERINAMACWVCFLCLPFSRSGLLQRRKRWRHQLKAFHDQEGAGPMEIYKTVSAWKRQPVRVLSLFRNIDKVLKSLGFLESGSGSGGGTLKYVEDVTNVVRRDVEKWGPFDLVYGSTQPLGSSCDRCPGWYMFQFHRILQYALPRQESQRPFFWIFMDNLLLTEDDQETTTRFLQTEAVTLQDVRGRDYQNAMRVWSNIPGLKSKHAPLTPKEEEYLQAQVRSRSKLDAPKVDLLVKNCLLPLREYFKYFSQNSLPL

SEQ ID NO: 581 - protein, 214 aa, Mus musculus
GPMEIYKTVSAWKRQPVRVLSLFRNIDKVLKSLGFLESGSGSGGGTLKYVEDVTNVVRRDVEKWGPFDLVYGSTQPLGSSCDRCPGWYMFQFHRILQYALPRQESQRPFFWIFMDNLLLTEDDQETTTRFLQTEAVTLQDVRGRDYQNAMRVWSNIPGLKSKHAPLTPKEEEYLQAQVRSRSKLDAPKVDLLVKNCLLPLREYFKYFSQNSLPL

SEQ ID NO: 582 - protein, 403 aa, Ailuropoda melanoleuca
MALSPTGTLSVETLDRSDPDPLDEGPWQATCEILLEPDAEHSTDVILVGSSELSAPASPGPRRDLLAYEVKVNQRDIEDVCICCGSLRVHTQHPLFEGGMCAPCKDKFLDCLFLYDDDGYQSYCSICCAGETLLICENPDCTRPSLMMKLRLFRECACLIFPSEGMLLQTVWFWKMTVVWQPGLRHLPQENPLETYKTVPVWKREPVRVLSLFGDIRRELMSLGFLESGSAPGRLKHLDDVTDVVRKDVEGWGPFDLVYGSTPPIGHACDHPPVWYLLQFHRILQYARPRPGSQQPFFWMFVDNLVLSQDDQTAATRFLEADPVTIQDVCGRAVRNTVHVWSNIPAVRSRHSALALCEELSLLAQDRQRTKPPAQGPAQLVKNCFLPLREYFKYFSTELTSSL

SEQ ID NO: 583 - protein, 213 aa, Ailuropoda melanoleuca
NPLETYKTVPVWKREPVRVLSLFGDIRRELMSLGFLESGSAPGRLKHLDDVTDVVRKDVEGWGPFDLVYGSTPPIGHACDHPPVWYLLQFHRILQYARPRPGSQQPFFWMFVDNLVLSQDDQTAATRFLEADPVTIQDVCGRAVRNTVHVWSNIPAVRSRHSALALCEELSLLAQDRQRTKPPAQGPAQLVKNCFLPLREYFKYFSTELTSSL

SEQ ID NO: 584 - protein, 426 aa, Carlito syrichta
MALSCRRTLPLESLHSSNSDLASQLDKEQWRPPCETHGIPVAAAPVLDLEAECSLDVILVGSSELSTSSSPRLGRDHIAYEVKVNQRNIEDICLCCGSFLVHTQHPLFEGGMCAPCKDKFLDTLFLYDEDGYQSYCSICCSGETLLICENPDCTRCYCFECLDTLVSPGTSEKVHAMSNWVCFLCLPFTRSGLLQRRRKWRGQLKAFYDRESESSLEMYKTVPVWKREPVRVLSLFGDIKKELMSLGFVETGSDPGRLRHLDDTTNIVRRNVEEWGPFHLLYGATPPLGHTCDRPPGWYLFQFHRLLQYARPQPGSPQPFFWMFVDNVMLTREDRAIASRFLETEPVTIPDIHGRALQNAVCVWSNIPAVRSKHSALVSEEELSLLAQDRQRAKLPTQGPTKLVKNCFLPLREYFKYFSTELTSFL

SEQ ID NO: 585 - protein, 213 aa, Carlito syrichta
SSLEMYKTVPVWKREPVRVLSLFGDIKKELMSLGFVETGSDPGRLRHLDDTTNIVRRNVEEWGPFHLLYGATPPLGHTCDRPPGWYLFQFHRLLQYARPQPGSPQPFFWMFVDNVMLTREDRAIASRFLETEPVTIPDIHGRALQNAVCVWSNIPAVRSKHSALVSEEELSLLAQDRQRAKLPTQGPTKLVKNCFLPLREYFKYFSTELTSFL

SEQ ID NO: 586 - protein, 424 aa, Meriones unguiculatus
MGSQETPSTRAKTPGTWNLESTDSSSPESLGHLEEQWANSSPDLKDEHSKDVEPEDSKELISSASPPSGREIIRYEISVNQRNIEDICLCCGTLQVYKQHPLFEGGICAPCKDKFLETFFLYDEDGHQSYCSICCSGGTLFICESPDCTRCYCFECVDILVGPGTSERINAMPCWVCFLCLPFTRSGLLQRRRKWRHQLKAFFDEGGASPLEMYKTVSAWKRKPMRVLSLFKNIDKELKNLGFLESGSGSEEERLKYLEDVTNVVRRDVEKWGPFDLVYGSTRPRGSSCDHCPAWYMFQFHRILQYARPPSGSEQPFFWVFVDNLLMTEDDQITADRFLQMKAVTLQDVRGRVLQNAVRVWSNIPGVKSKHMALTEKEEQSLEAQAGTRTKLSAQKVDPLVKNCLLPLREYFKFFSQNSLPLDK

SEQ ID NO: 587 - protein, 216 aa, Meriones unguiculatus
SPLEMYKTVSAWKRKPMRVLSLFKNIDKELKNLGFLESGSGSEEERLKYLEDVTNVVRRDVEKWGPFDLVYGSTRPRGSSCDHCPAWYMFQFHRILQYARPPSGSEQPFFWVFVDNLLMTEDDQITADRFLQMKAVTLQDVRGRVLQNAVRVWSNIPGVKSKHMALTEKEEQSLEAQAGTRTKLSAQKVDPLVKNCLLPLREYFKFFSQNSLPLDK

SEQ ID NO: 588 - protein, 409 aa, Ochotona princeps
MALPSPETLDSLDRVPASHPDEQHWTVCDNSDPILEVEAEGSMDVILVDDSPAPSGRDRIELEVKVNQRSIEDLCLCCGSSQVHRQHPLFQGGLCAPCKDKFLEALFLYDEDGYQSYCSICGLGDTLLVCESPDCTRGYCFACVDGLVGAGSSGHMHTVSPWVCFLCVPGSRHGLLQRRRRWRTQLKVFHEQEAAQPLEIYETVPACRRKPLRVLSLFEHIEKELASLGFLETGSSPGRIRHLDDVTDVVRRDVEQWGPFDLVYGSTPPLGHASPRSPGWYLFQFHRMLQYTQPTASTQRPFFWMFVDNLLLTRDDLVTATRFLEVEPATLQDVRGRVLQGAMRVWSNIPAVNSRHTELAPEAETALLAQSCRRAKASGEGLARLLKSCFLPLREYFKYFPQSPLPLRK

SEQ ID NO: 589 - protein, 214 aa, Ochotona princeps
QPLEIYETVPACRRKPLRVLSLFEHIEKELASLGFLETGSSPGRIRHLDDVTDVVRRDVEQWGPFDLVYGSTPPLGHASPRSPGWYLFQFHRMLQYTQPTASTQRPFFWMFVDNLLLTRDDLVTATRFLEVEPATLQDVRGRVLQGAMRVWSNIPAVNSRHTELAPEAETALLAQSCRRAKASGEGLARLLKSCFLPLREYFKYFPQSPLPLRK

SEQ ID NO: 590 - protein, 224 aa, unidentified
  source 1..224: note = Neosciurus carolinensis
MGGPRPAAVEESPHEIYKTVPAWKREPMRVLSLFGDIGKELTSLGFLETGSEAGRLKHLEDVTDTVRRDVEEWGPFDLVYGSTPALGHSCDRSPGWYLFQFHRLLQYARPRLGSPKPFFWMFVDNLLLTKDDQAIASRFLEMEPVTLQDVHGRVLQNAVRVWTNVPAVKSRHSALASEEELLLVQDGQRGRLPAQGPAALVKHCFLPLREYFKYFSQNTLPLYK

SEQ ID NO: 591 - protein, 213 aa, unidentified
  source 1..213: note = Neosciurus carolinensis
SPHEIYKTVPAWKREPMRVLSLFGDIGKELTSLGFLETGSEAGRLKHLEDVTDTVRRDVEEWGPFDLVYGSTPALGHSCDRSPGWYLFQFHRLLQYARPRLGSPKPFFWMFVDNLLLTKDDQAIASRFLEMEPVTLQDVHGRVLQNAVRVWTNVPAVKSRHSALASEEELLLVQDGQRGRLPAQGPAALVKHCFLPLREYFKYFSQNTLPLYK

SEQ ID NO: 592 - protein, 417 aa, Bison bison
MARSSPGTLNLEIMDGSDPDPALPPDREQWPPPCEILLDPEPEHSLDIILVGSSELSSPPSPGPRRDFIAYEVKVNQRDIEDVCICCGSLQLHTQHPLFEGGMCAPCKDKFLECLFLYDDDGYQSYCSICCAGETLLICENPDCTRCYCFECVDTLVGPGTSGKVHAMSNWVCFLCLPFPRSGLLQRRRKWRTWLKAFYDREAESPLVMYKTVPVWKREPIRVLSLFGDIKKELTSLGFLEDGSKPGRLKHLDDVTNIVRRDIDEWGPFDLTYGSTPTLGHTCDHPPGWYVYQFHRILQYARPLPGSPQPFFWMFVDNLVLTEEDLDVATRFLETDPVTIQDVRGRTVQNAVHVWSNIPAVKSRHSALVSQEELSLLAQDRQRVKSPVQGPATLVKNCFLPLREYFKYFSTELTSSL

SEQ ID NO: 593 - protein, 213 aa, Bison bison
SPLVMYKTVPVWKREPIRVLSLFGDIKKELTSLGFLEDGSKPGRLKHLDDVTNIVRRDIDEWGPFDLTYGSTPTLGHTCDHPPGWYVYQFHRILQYARPLPGSPQPFFWMFVDNLVLTEEDLDVATRFLETDPVTIQDVRGRTVQNAVHVWSNIPAVKSRHSALVSQEELSLLAQDRQRVKSPVQGPATLVKNCFLPLREYFKYFSTELTSSL

SEQ ID NO: 594 - protein, 443 aa, Equus przewalskii
MALSSPGTLSLETLDSWDPDVAGQLDEERWQPSSEIVGRPMAAAPVLDLEEEPSMDIILVDSSELSSPPSPGPSRDMCICCGSFQVHTQHPLFEGGMCAACKDKFLSCLFLYDDDGNQSYCSICCSGETLLICENPDCTRCYCFECVDTLVSPRTSEKVQAMSNWVCFLCLPFPRSGLLQRRRKWRGWLKAFYDQEAVRSRSAWGRRMRSGPHLVGFLWLLVAKCPSALESPLEMYKTVPVWKREPVRVLSLFGDIKKELTTLGFLENGSDPGRLKHLDDVTNTVRRDVEEWGPFDLVYGSTPPLGHACDHPPGWYLFQFHRVLQYARPRPGSPQAFFWMFVDNLVLTEDDRAVATRFLETDPVTIQDVCGRAVRNAVHVWSNIPAVKSRHSALFSQEESFLRAQDRQRAKPPARGPAKLVKNCFLPLREYFKYFSTEFTSSL

SEQ ID NO: 595 - protein, 213 aa, Equus przewalskii
SPLEMYKTVPVWKREPVRVLSLFGDIKKELTTLGFLENGSDPGRLKHLDDVTNTVRRDVEEWGPFDLVYGSTPPLGHACDHPPGWYLFQFHRVLQYARPRPGSPQAFFWMFVDNLVLTEDDRAVATRFLETDPVTIQDVCGRAVRNAVHVWSNIPAVKSRHSALFSQEESFLRAQDRQRAKPPARGPAKLVKNCFLPLREYFKYFSTEFTSSL

SEQ ID NO: 596 - protein, 415 aa, Mus caroli
MGSRETPSSFSKTLETLDLETSDSSSPDADSPLEEQWLKSSPALKEDNVDMVLEDCKEPLSPSSPPTGREMIRYEVKVNRRSIEDICLCCGTLQVYTQHPLFEGGICAPCKDKFLESLFLYDDDGHQSYCTICCSGGTLFICESPDCTRCYCFECVDILVGPGTSERINAMACWVCFLCLPFSRSGLLQRRKRWRHQLKAFHDQEGAGPMEIYKTVSTWKRQPVRVLSLFGNIDKVLKSLGFLESGSGSGGGTLKYVEDVTNVVRRDVEKWGPFDLVYGSTQPLGSSCDRCPGWYMFQFHRILQYALPRQESQRPFFWIFMDNLLMTEDDQETTARFLQTEAVTLQDVRGRDYQNVMRVWSNIPGLKSKHVPLTPKEEEYLQAQVRTRSKLDAQKVDLLVKNCLLPLREYFKYFS

SEQ ID NO: 597 - protein, 208 aa, Mus caroli
GPMEIYKTVSTWKRQPVRVLSLFGNIDKVLKSLGFLESGSGSGGGTLKYVEDVTNVVRRDVEKWGPFDLVYGSTQPLGSSCDRCPGWYMFQFHRILQYALPRQESQRPFFWIFMDNLLMTEDDQETTARFLQTEAVTLQDVRGRDYQNVMRVWSNIPGLKSKHVPLTPKEEEYLQAQVRTRSKLDAQKVDLLVKNCLLPLREYFKYFS

SEQ ID NO: 598 - protein, 387 aa, Pan troglodytes
MAAIPALDPEAEPSMDVILVGSSELSSSISPRTGRDLIAYEVKANQRNIEDICICCGSLQVHTQHPLFEGGICAPCKDKSLDALFLYDDDGYQSYCSICCSGETLLICGNPDCTRCYCFECVDSLVGPGTSGKVHAMSNWVCYLCLPSSRSGLLQRRRKWRSQLKAFYDRESENPLEMFETVPVWRRQPVRVLSLFEDIKKELTSLGFLESGSDPGQLKHVVDVTDTVRKDVEEWGPFDLVYGATPPLGHTCDRPPSWYLFQFHRLLQYARPKPGSPRPFFWMFVDNLVLNKEDLDVASRFLEMEPVTIPDVHGGSLQNAVRVWSNIPAIRSSRHWALVSEEELSLLAQNKQSSKLAAKWPTKLVKNCFLPLREYFKYFSTELTSSL

SEQ ID NO: 599 - protein, 214 aa, Pan troglodytes
NPLEMFETVPVWRRQPVRVLSLFEDIKKELTSLGFLESGSDPGQLKHVVDVTDTVRKDVEEWGPFDLVYGATPPLGHTCDRPPSWYLFQFHRLLQYARPKPGSPRPFFWMFVDNLVLNKEDLDVASRFLEMEPVTIPDVHGGSLQNAVRVWSNIPAIRSSRHWALVSEEELSLLAQNKQSSKLAAKWPTKLVKNCFLPLREYFKYFSTELTSSL

SEQ ID NO: 600 - protein, 391 aa, Homo sapiens
MEPLRVLELYSGVGGMHHALRESCIPAQVVAAIDVNTVANEVYKYNFPHTQLLAKTIEGITLEEFDRLSFDMILMSPPCQPFTRIGRQGDMTDSRTNSFLHILDILPRLQKLPKYILLENVKGFEVSSTRDLLIQTIENCGFQYQEFLLSPTSLGIPNSRLRYFLIAKLQSEPLPFQAPGQVLMEFPKIESVHPQKYAMDVENKIQEKNVEPNISFDGSIQCSGKDAILFKLETAEEIHRKNQQDSDLSVKMLKDFLEDDTDVNQYLLPPKSLLRYALLLDIVQPTCRRSVCFTKGYGSYIEGTGSVLQTAEDVQVENIYKSLTNLSQEEQITKLLILKLRYFTPKEIANLLGFPPEFGFPEKITVKQRYRLLGNSLNVHVVAKLIKILYE

SEQ ID NO: 601 - protein, 353 aa, unidentified
  source 1..353: note = Mycoplasmatales bacterium
MAEWYIPAIVSYQAIHNGFTLNKINHKIELQTMIDYLESKTLSMNSKEPVKRGFWYKKHLDEIRIVYTAVKMSEQEGNIFDVRTLFERGLSDIDLLTYSFPCQDLSQQGKQKGMGRDSQTRSGLLWEIEKALDTSKKEDLPKYLLMENVVALTHKVNAEELDEWMMKLESLGYKNDLRILNAGDFGSSQARRRTFMISTLNEKVELPVGNKKPKSMNKILNDEPTRKDFLPALDKFDLTEYKWTKSNINKAKLINYSTFNSEAYVYDSNFTGPTLTASGANSRIKFEYNGKIRKIGAEEAYAYMGFKKSDYIKVNKLNYLNETKMIYTCGNSISVEVLRSIMTNINNNFKENK

SEQ ID NO: 602 - protein, 398 aa, unidentified
  source 1..398: note = Mycoplasma marinum
MLFLIGTFKYVLIYITKVIRIFEAFAGIGAQRKALRNIKSNYEVSGMAEWYIPAIVSYQAIHNGFTLSRVDKKTKLTEMIKYLESKTLSMDSKEPVRTGYWFKKHKDMVRIVYSAVKLSEAEGNIFDVRTLHERKLEDIDLLTYSFPCQDLSQQGKQRGMKKDSGTRSGLLWEIEKALEATPKDKLPKYLLMENVVALTHKTNKKDLDNWKRKLRSLGYYNDINVLNAGDFGSSQARRRAFMISTLDSKVTLPLGDKKPQAISKILNKETRSQDFMPALDEYEKTDFKRTLSNIKKCKLIDYTSFNSEAYVYDPKYTGPTLTASGANSRIKFTHQGKMRKINAEEAYRYMGFSTNDYKKVNNLNFLSETKMIYTCGNSISVEVLEEIMLKIIREDNNG

SEQ ID NO: 603 - protein, 381 aa, Spiroplasma chinense
MKKIRLFEAFAGIGSQRRALKSVVGNNFEIAGLAEWYVPAIVMYQIINNDFSKKNVLDNVPRDEVIDYLNSKCLSWDSKKPVSKNFWNRKSQDILNVIYSAVKKSEEEGNIFDVRTLHERTLESIDILTYSFPCQDLSQQGIQKGMKKNSGTRSGLLWEIEKAIDNTPKNNLPKILLMENVPALLNKTNELELKEWLIKLENMGYKNSIGILNAADFGSPQARRRVFMISSRNKKIELPVGKSKPGKLNDILEKNVEDKFIMTNLEKYDFSEFSLTKSNIKKCSLINYTKFNSEAYVYDPDFTGPTLTASGANSRIKIYDKGFIRRMSPLESFRYMGFDDEDYKKIDEFEFLTDTQKIFVCGNSISIEVLKAIFERIDSNE

SEQ ID NO: 604 - protein, 395 aa, Mycoplasma penetrans
MNSNKDKIKVIKVFEAFAGIGSQFKALKNIARSKNWEIQHSGMVEWFVDAIVSYVAIHSKNFNPKIEQLDKDILSISNDSKMPISEYGIKKINNTIKASYLNYAKKHFNNLFDIKKVNKDNFPKNIDIFTYSFPCQDLSVQGLQKGIDKELNTRSGLLWEIERILEEIKNSFSKEEMPKYLLMENVKNLLSHKNKKNYNTWLKQLEKFGYKSKTYLLNSKNFDNCQNRERVFCLSIRDDYLEKTGFKFKELEKVKNPPKKIKDILVDSSNYKYLNLNKYETTTFRETKSNIISRSLKNYTTFNSENYVYNINGIGPTLTASGANSRIKIETQQGVRYLTPLECFKYMQFDVNDFKKVQSTNLISENKMIYIAGNSIPVKILEAIFNTLEFVNNEE

SEQ ID NO: 605 - protein, 386 aa, unidentified
  source 1..386: note = S. monobiae
MSKVENKTKKLRVFEAFAGIGAQRKALEKVRKDEYEIVGLAEWYVPAIVMYQAIHNNFHTKLEYKSVSREEMIDYLENKTLSWNSKNPVSNGYWKRKKDDELKIIYNAIKLSEKEGNIFDIRDLYKRTLKNIDLLTYSFPCQDLSQQGIQKGMKRGSGTRSGLLWEIERALDSTEKNDLPKYLLMENVGALLHKKNEEELNQWKQKLESLGYQNSIEVLNAADFGSSQARRRVFMISTLNEFVELPKGDKKPKSIKKVLNKIVSEKDILNNLLKYNLTEFKKTKSNINKASLIGYSKFNSEGYVYDPEFTGPTLTASGANSRIKIKDGSNIRKMNSDETFLYIGFDSQDGKRVNEIEFLTENQKIFVCGNSISVEVLEAIIDKIGG

SEQ ID NO: 606 - protein, 358 aa, Haemophilus parainfluenzae
MKDVLDDNLLEEPAAQYSLFEPESNPNLREKFTFIDLFAGIGGFRIAMQNLGGKCIFSSEWDEQAQKTYEANFGDLPYGDITLEETKAFIPEKFDILCAGFPCQAFSIAGKRGGFEDTRGTLFFDVAEIIRRHQPKAFFLENVKGLKNHDKGRTLKTILNVLREDLGYFVPEPAIVNAKNFGVPQNRERIYIVGFHKSTGVNSFSYPEPLDKIVTFADIREEKTVPTKYYLSTQYIDTLRKHKERHESKGNGFGYEIIPDDGIANAIVVGGMGRERNLVIDHRITDFTPTTNIKGEVNREGIRKMTPREWARLQGFPDSYVIPVSDASAYKQFGNSVAVPAIQATGKKILEKLGNLYD

SEQ ID NO: 607 - protein, 521 aa, unidentified
  source 1..521: note = Arthrobacter luteus
MSKANAKYSFVDLFAGIGGFHAALAATGGVCEYAVEIDREAAAVYERNWNKPALGDITDDANDEGVTLRGYDGPIDVLTGGFPCQPFSKSGAQHGMAETRGTLFWNIARIIEEREPTVLILENVRNLVGPRHRHEWLTIIETLRFFGYEVSGAPAIFSPHLLPAWMGGTPQVRERVFITATLVPERMRDERIPRTETGEIDAEAIGPKPVATMNDRFPIKKGGTELFHPGDRKSGWNLLTSGIIREGDPEPSNVDLRLTETETLWIDAWDDLESTIRRATGRPLEGFPYWADSWTDFRELSRLVVIRGFQAPEREVVGDRKRYVARTDMPEGFVPASVTRPAIDETLPAWKQSHLRRNYDFFERHFAEVVAWAYRWGVYTDLFPASRRKLEWQAQDAPRLWDTVMHFRPSGIRAKRPTYLPALVAITQTSIVGPLERRLSPRETARLQGLPEWFDFGEQRAAATYKQMGNGVNVGVVRHILREHVRRDRALLKLTPAGQRIINAVLADEPDATVGALGAAE

SEQ ID NO: 608 - protein, 330 aa, Haemophilus aegyptius
MNLISLFSGAGGLDLGFQKAGFRIICANEYDKSIWKTYESNHSAKLIKGDISKISSDEFPKCDGIIGGPPCQSWSEGGSLRGIDDPRGKLFYEYIRILKQKKPIFFLAENVKGMMAQRHNKAVQEFIQEFDNAGYDVHIILLNANDYGVAQDRKRVFYIGFRKELNINYLPPIPHLIKPTFKDVIWDLKDNPIPALDKNKTNGNKCIYPNHEYFIGSYSTIFMSRNRVRQWNEPAFTVQASGRQCQLHPQAPVMLKVSKNLNKFVEGKEHLYRRLTVRECARVQGFPDDFIFHYESLNDGYKMIGNAVPVNLAYEIAKTIKSALEICKGN

SEQ ID NO: 609 - protein, 327 aa, Haemophilus haemolyticus
MIEIKDKQLTGLRFIDLFAGLGGFRLALESCGAECVYSNEWDKYAQEVYEMNFGEKPEGDITQVNEKTIPDHDILCAGFPCQAFSISGKQKGFEDSRGTLFFDIARIVREKKPKVVFMENVKNFASHDNGNTLEVVKNTMNELDYSFHAKVLNALDYGIPQKRERIYMICFRNDLNIQNFQFPKPFELNTFVKDLLLPDSEVEHLVIDRKDLVMTNQEIEQTTPKTVRLGIVGKGGQGERIYSTRGIAITLSAYGGGIFAKTGGYLVNGKTRKLHPRECARVMGYPDSYKVHPSTSQAYKQFGNSVVINVLQYIAYNIGSSLNFKPY

SEQ ID NO: 610 - protein, 418 aa, unidentified
  source 1..418: note = Moraxella
MKPEILKLIRSKLDLTQKQASEIIEVSDKTWQQWESGKTEMHPAYYSFLQEKLKDKINFEELSAQKTLQKKIFDKYNQNQITKNAEELAEITHIEERKDAYSSDFKFIDLFSGIGGIRQSFEVNGGKCVFSSEIDPFAKFTYYTNFGVVPFGDITKVEATTIPQHDILCAGFPCQPFSHIGKREGFEHPTQGTMFHEIVRIIETKKTPVLFLENVPGLINHDDGNTLKVIIETLEDMGYKVHHTVLDASHFGIPQKRKRFYLVAFLNQNIHFEFPKPPMISKDIGEVLESDVTGYSISEHLQKSYLFKKDDGKPSLIDKNTTGAVKTLVSTYHKIQRLTGTFVKDGETGIRLLTTNECKAIMGFPKDFVIPVSRTQMYRQMGNSVVVPVVTKIAEQISLALKTVNQQSPQENFELELV

SEQ ID NO: 611 - protein, 537 aa, Ascobolus sp.
MSERRYEAGMTVALHEGSFLKIQRVYIRQYHADNRREHMLVGPLFRRTKYLKALSKKVNEVAIVHESIHVPVQDVIGVRELIITNRPFPECRKGDEHTGRLVCRWVYNLDERAKGREYKKQRYIRRITEAEADPEYRVEDRVLRRRWFQEGYIGDEISYKEHGNGDIVDIRSESPLQVLDGWGGDLVDLENGEETSIPGPCRSASSYGRLMKPPLAQAADSNTSRKYTFGDTFCGGGGVSLGARQAGLEVKWAFDMNPNAGANYRRNFPNTDFFLAEAEQFIQLSVGISQHVDILHLSPPCQTFSRAHTIAGKNDENNEASFFAVVNLIKAVRPRLFTVEETDGIMDRQSRQFIDTALMGITELGYSFRICVLNAIEYGVCQNRKRLIIIGAAPGEELPPFPLPTHQDFFSKDPRRDLLPAVTLDDALSTITPESTDHHLNHVWQPAEWKTPYDAHRPFKNAIRAGGGEYDIYPDGRRKFTVRELACIQGFPDEYEFVGTLTDKRRIIGNAVPPPLSAAIMSTLRQWMTEKDFERME

SEQ ID NO: 612 - protein, 1534 aa, Arabidopsis sp.
MVENGAKAAKRKKRPLPEIQEVEDVPRTRRPRRAAACTSFKEKSIRVCEKSATIEVKKQQIVEEEFLALRLTALETDVEDRPTRRLNDFVLFDSDGVPQPLEMLEIHDIFVSGAILPSDVCTDKEKEKGVRCTSFGRVEHWSISGYEDGSPVIWISTELADYDCRKPAASYRKVYDYFYEKARASVAVYKKLSKSSGGDPDIGLEELLAAVVRSMSSGSKYFSSGAAIIDFVISQGDFIYNQLAGLDETAKKHESSYVEIPVLVALREKSSKIDKPLQRERNPSNGVRIKEVSQVAESEALTSDQLVDGTDDDRRYAILLQDEENRKSMQQPRKNSSSGSASNMFYIKINEDEIANDYPLPSYYKTSEEETDELILYDASYEVQSEHLPHRMLHNWALYNSDLRFISLELLPMKQCDDIDVNIFGSGVVTDDNGSWISLNDPDSGSQSHDPDGMCIFLSQIKEWMIEFGSDDIISISIRTDVAWYRLGKPSKLYAPWWKPVLKTARVGISILTFLRVESRVARLSFADVTKRLSGLQANDKAYISSDPLAVERYLVVHGQIILQLFAVYPDDNVKRCPFVVGLASKLEDRHHTKWIIKKKKISLKELNLNPRAGMAPVASKRKAMQATTTRLVNRIWGEFYSNYSPEDPLQATAAENGEDEVEEEGGNGEEEVEEEGENGLTEDTVPEPVEVQKPHTPKKIRGSSGKREIKWDGESLGKTSAGEPLYQQALVGGEMVAVGGAVTLEVDDPDEMPAIYFVEYMFESTDHCKMLHGRFLQRGSMTVLGNAANERELFLTNECMTTQLKDIKGVASFEIRSRPWGHQYRKKNITADKLDWARALERKVKDLPTEYYCKSLYSPERGGFFSLPLSDIGRSSGFCTSCKIREDEEKRSTIKLNVSKTGFFINGIEYSVEDFVYVNPDSIGGLKEGSKTSFKSGRNIGLRAYVVCQLLEIVPKESRKADLGSFDVKVRRFYRPEDVSAEKAYASDIQELYFSQDTVVLPPGALEGKCEVRKKSDMPLSREYPISDHIFFCDLFFDTSKGSLKQLPANMKPKFSTIKDDTLLRKKKGKGVESEIESEIVKPVEPPKEIRLATLDIFAGCGGLSHGLKKAGVSDAKWAIEYEEPAGQAFKQNHPESTVFVDNCNVILRAIMEKGGDQDDCVSTTEANELAAKLTEEQKSTLPLPGQVDFINGGPPCQGFSGMNRFNQSSWSKVQCEMILAFLSFADYFRPRYFLLENVRTFVSFNKGQTFQLTLASLLEMGYQVRFGILEAGAYGVSQSRKRAFIWAAAPEEVLPEWPEPMHVFGVPKLKISLSQGLHYAAVRSTALGAPFRPITVRDTIGDLPSVENGDSRTNKEYKEVAVSWFQKEIRGNTIALTDHICKAMNELNLIRCKLIPTRPGADWHDLPKRKVTLSDGRVEEMIPFCLPNTAERHNGWKGLYGRLDWQGNFPTSVTDPQPMGKVGMCFHPEQHRILTVRECARSQGFPDSYEFAGNINHKHRQIGNAVPPPLAFALGRKLKEALHLKKSPQHQP

SEQ ID NO: 613 - protein, 1356 aa, Ascobolus sp.
MELTPELSGVSTDLGGGGSIFAHWRMKEESPAPTEILDDLNVLEWEKTTRDYSKEDLRIADQLFSIEDEHQSLPFETADAEDGTPTEEEEEKELPMRTLDNFVLYDASDLELAALDLIGTELNIHAVGTVGPIYTEGEEDEQEDEDEDVSPPVRTGTQATSASVTQMTVELYIRNIVQYEFCFNDDGTVETWIQTTNAHYKLLQPAKCYTSLYRPVNDCLNVITAIITLAPESTTMSLKDLLKVMDDKAQAVSYEEVERMSEFIVQHLDQWMETAPKKKSKLIEKSKVYIDLNNLAGIDMVSGVRPPPVRRVTGRSSAPKKRIVRNMNDAVLLHQNETTVTNWIHQLSAGMFGRALNVLGAETADVENLTCDPASAKFVVPQRRLHKRLKWETRGHIPVSEEEYKHIYQGKKYAKFFEAVRAVDESKLTIKLGDLVYVLDQDPKVTQTQFATAGREGRKKGAEKEKIQVRFGRVLSIRQPDSNSKDAQNVFIHVQWLVLGCDTILQEMASRRELFLTDSCDTVFADVIYGVAKLTPLGAKDIPTVEFHESMATMMGENEFFVRFKYNYQDGSFTDLKDVDAEQIGTLQPRVNTHRNPGYCSNCRIKYDNERTGDKWIYENDTEGEPRLFRSSKGWCIYAQEFVYLQPVEKQPGTTFRVGYISEINKSSVIVELLARVDDDDKSGHISYSDPRHLYFTGTDIKVTFDKIIRKCFVFHDSGDQKAKAPLMYGTLQRDLYYYRYEKRKGKAELVPVREIRSIHEQTLNDWESRTQIERHGAVSGKKLKGLDIFAGCGGLTLGLDLSGAVDTKWDIEFAPSAANTLALNFPDAQVFNQCANVLLSRAIQSEDEGSLDIEYDLQGRVLPDLPKKGEVDFIYGGPPCQGFSGVNRYKKGNDIKNSLVATFLSYVDHYKPRFVLLENVKGLITTKLGNSKNAEGKWEGGISNGVVKFIYRTLISMNYQCRIGLVQSGEYGVPQSRPRVIFLAARMGERLPDLPEPMHAFEVLDSQYALPHIKRYHTTQNGVAPLPRITIGEAVSDLPKFQYANPGVWPRHDPYSSAKAQPSDKTIEKFSVSKATSFVGYLLQPYHSRPQSEFQRRLRTKLVPSDEPAEKTSLLTTKLVTAHVTRLFNKETTQRIVCVPMWPGADHRSLPKEMRPWCLVDPNSQAEKHRFWPGLFGRLGMEDFFSTALTDVQPCGKQGKVLHPTQRRVYTVRELARAQGFPDWFAFTDGDADSGLGGVKKWHRNIGNAVPVPLGEQIGRCIGYSVWWKDDMIAQLREDGADEDEEMIDGNDQWVEELNTQMAADMPGLPLLVTHLLNLCVYRRLYGPNAKEFLPARVYDKKLEGGRRRLVWAML

SEQ ID NO: 614 - protein, 1454 aa, unidentified
  source 1..1454: note = Neurospora
MDSPDRSHGGMFIDVPAETMGFQEDYLDMFASVLSQGLAKEGDYAHHQPLPAGKEECLEPIAVATTITPSPDDPQLQLQLELEQQFQTESGLNGVDPAPAPESEDEADLPDGFSDESPDDDFVVQRSKHITVDLPVSTLINPRSTFQRIDENDNLVPPPQSTPERVAVEDLLKAAKAAGKNKEDYIEFELHDFNFYVNYAYHPQEMRPIQLVATKVLHDKYYFDGVLKYGNTKHYVTGMQVLELPVGNYGASLHSVKGQIWVRSKHNAKKEIYYLLKKPAFEYQRYYQPFLWIADLGKHVVDYCTRMVERKREVTLGCFKSDFIQWASKAHGKSKAFQNWRAQHPSDDFRTSVAANIGYIWKEINGVAGAKRAAGDQLFRELMIVKPGQYFRQEVPPGPVVTEGDRTVAATIVTPYIKECFGHMILGKVLRLAGEDAEKEKEVKLAKRLKIENKNATKADTKDDMKNDTATESLPTPLRSLPVQVLEATPIESDIVSIVSSDLPPSENNPPPLTNGSVKPKAKANPKPKPSTQPLHAAHVKYLSQELVNKIKVGDVISTPRDDSSNTDTKWKPTDTDDHRWFGLVQRVHTAKTKSSGRGLNSKSFDVIWFYRPEDTPCCAMKYKWRNELFLSNHCTCQEGHHARVKGNEVLAVHPVDWFGTPESNKGEFFVRQLYESEQRRWITLQKDHLTCYHNQPPKPPTAPYKPGDTVLATLSPSDKFSDPYEVVEYFTQGEKETAFVRLRKLLRRRKVDRQDAPANELVYTEDLVDVRAERIVGKCIMRCFRPDERVPSPYDRGGTGNMFFITHRQDHGRCVPLDTLPPTLRQGFNPLGNLGKPKLRGMDLYCGGGNFGRGLEEGGVVEMRWANDIWDKAIHTYMANTPDPNKTNPFLGSVDDLLRLALEGKFSDNVPRPGEVDFIAAGSPCPGFSLLTQDKKVLNQVKNQSLVASFASFVDFYRPKYGVLENVSGIVQTFVNRKQDVLSQLFCALVGMGYQAQLILGDAWAHGAPQSRERVFLYFAAPGLPLPDPPLPSHSHYRVKNRNIGFLCNGESYVQRSFIPTAFKFVSAGEGTADLPKIGDGKPDACVRFPDHRLASGITPYIRAQYACIPTHPYGMNFIKAWNNGNGVMSKSDRDLFPSEGKTRTSDASVGWKRLNPKTLFPTVTTTSNPSDARMGPGLHWDEDRPYTVQEMRRAQGYLDEEVLVGRTTDQWKLVGNSVSRHMALAIGLKFREAWLGTLYDESAVVATATATATTAAAVGVTVPVMEEPGIGTTESSRPSRSPVHTAVDLDDSKSERSRSTTPATVLSTSSAAGDGSANAAGLEDDDNDDMEMMEVTRKRSSPAVDEEGMRPSKVQKVEVTVASPASRRSSRQASRNPTASPSSKASKATTHEAPAPEELESDAESYSETYDKEGFDGDYHSGHEDQYSEEDEEEEYAEPETMTVNGMTIVKL

SEQ ID NO: 615 - protein, 345 aa, unidentified
  source 1..345: note = Drosophila
MVFRVLELFSGIGGMHYAFNYAQLDGQIVAALDVNTVANAVYAHNYGSNLVKTRNIQSLSVKEVTKLQANMLLMSPPCQPHTRQGLQRDTEDKRSDALTHLCGLIPECQELEYILMENVKGFESSQARNQFIESLERSGFHWREFILTPTQFNVPNTRYRYYCIARKGADFPFAGGKIWEEMPGAIAQNQGLSQIAEIVEENVSPDFLVPDDVLTKRVLVMDIIHPAQSRSMCFTKGYTHYTEGTGSAYTPLSEDESHRIFELVKEIDTSNQDASKSEKILQQRLDLLHQVRLRYFTPREVARLMSFPENFEFPPETTNRQKYRLLGNSINVKVVGELIKLLTIK

SEQ ID NO: 616 - protein, 330 aa, unidentified
  source 1..330: note = Schizosaccharomyces pombe
MLSTKRLRVLELYSGIGGMHYALNLANIPADIVCAIDINPQANEIYNLNHGKLAKHMDISTLTAKDFDAFDCKLWTMSPSCQPFTRIGNRKDILDPRSQAFLNILNVLPHVNNLPEYILIENVQGFEESKAAEECRKVLRNCGYNLIEGILSPNQFNIPNSRSRWYGLARLNFKGEWSIDDVFQFSEVAQKEGEVKRIRDYLEIERDWSSYMVLESVLNKWGHQFDIVKPDSSSCCCFTRGYTHLVQGAGSILQMSDHENTHEQFERNRMALQLRYFTAREVARLMGFPESLEWSKSNVTEKCMYRLLGNSINVKVVSYLISLLLEPLNF

SEQ ID NO: 617 - protein, 624 aa, Arabidopsis sp.
MVMSHIFLISQIQEVEHGDSDDVNWNTDDDELAIDNFQFSPSPVHISATSPNSIQNRISDETVASFVEMGFSTQMIARAIEETAGANMEPMMILETLFNYSASTEASSSKSKVINHFIAMGFPEEHVIKAMQEHGDEDVGEITNALLTYAEVDKLRESEDMNININDDDDDNLYSLSSDDEEDELNNSSNEDRILQALIKMGYLREDAAIAIERCGEDASMEEVVDFICAAQMARQFDEIYAEPDKKELMNNNKKRRTYTETPRKPNTDQLISLPKEMIGFGVPNHPGLMMHRPVPIPDIARGPPFFYYENVAMTPKGVWAKISSHLYDIVPEFVDSKHFCAAARKRGYIHNLPIQNRFQIQPPQHNTIQEAFPLTKRWWPSWDGRTKLNCLLTCIASSRLTEKIREALERYDGETPLDVQKWVMYECKKWNLVWVGKNKLAPLDADEMEKLLGFPRDHTRGGGISTTDRYKSLGNSFQVDTVAYHLSVLKPLFPNGINVLSLFTGIGGGEVALHRLQIKMNVVVSVEISDANRNILRSFWEQTNQKGILREFKDVQKLDDNTIERLMDEYGGFDLVIGGSPCNNLAGGNRHHRVGLGGEHSSLFFDYCRILEAVRRKARHMRR

SEQ ID NO: 618 - protein, 626 aa, Arabidopsis sp.
MVIWNNDDDDFLEIDNFQSSPRSSPIHAMQCRVENLAGVAVTTSSLSSPTETTDLVQMGFSDEVFATLFDMGFPVEMISRAIKETGPNVETSVIIDTISKYSSDCEAGSSKSKAIDHFLAMGFDEEKVVKAIQEHGEDNMEAIANALLSCPEAKKLPAAVEEEDGIDWSSSDDDTNYTDMLNSDDEKDPNSNENGSKIRSLVKMGFSELEASLAVERCGENVDIAELTDFLCAAQMAREFSEFYTEHEEQKPRHNIKKRRFESKGEPRSSVDDEPIRLPNPMIGFGVPNEPGLITHRSLPELARGPPFFYYENVALTPKGVWETISRHLFEIPPEFVDSKYFCVAARKRGYIHNLPINNRFQIQPPPKYTIHDAFPLSKRWWPEWDKRTKLNCILTCTGSAQLTNRIRVALEPYNEEPEPPKHVQRYVIDQCKKWNLVWVGKNKAAPLEPDEMESILGFPKNHTRGGGMSRTERFKSLGNSFQVDTVAYHLSVLKPIFPHGINVLSLFTGIGGGEVALHRLQIKMKLVVSVEISKVNRNILKDFWEQTNQTGELIEFSDIQHLTNDTIEGLMEKYGGFDLVIGGSPCNNLAGGNRVSRVGLEGDQSSLFFEYCRILEVVRARMRGS

SEQ ID NO: 619 - protein, 791 aa, Arabidopsis sp.
MAARNKQKKRAEPESDLCFAGKPMSVVESTIRWPHRYQSKKTKLQAPTKKPANKGGKKEDEEIIKQAKCHFDKALVDGVLINLNDDVYVTGLPGKLKFIAKVIELFEADDGVPYCRFRWYYRPEDTLIERFSHLVQPKRVFLSNDENDNPLTCIWSKVNIAKVPLPKITSRIEQRVIPPCDYYYDMKYEVPYLNFTSADDGSDASSSLSSDSALNCFENLHKDEKFLLDLYSGCGAMSTGFCMGASISGVKLITKWSVDINKFACDSLKLNHPETEVRNEAAEDFLALLKEWKRLCEKFSLVSSTEPVESISELEDEEVEENDDIDEASTGAELEPGEFEVEKFLGIMFGDPQGTGEKTLQLMVRWKGYNSSYDTWEPYSGLGNCKEKLKEYVIDGFKSHLLPLPGTVYTVCGGPPCQGISGYNRYRNNEAPLEDQKNQQLLVFLDIIDFLKPNYVLMENVVDLLRFSKGFLARHAVASFVAMNYQTRLGMMAAGSYGLPQLRNRVFLWAAQPSEKLPPYPLPTHEVAKKFNTPKEFKDLQVGRIQMEFLKLDNALTLADAISDLPPVTNYVANDVMDYNDAAPKTEFENFISLKRSETLLPAFGGDPTRRLFDHQPLVLGDDDLERVSYIPKQKGANYRDMPGVLVHNNKAEINPRFRAKLKSGKNVVPAYAISFIKGKSKKPFGRLWGDEIVNTVVTRAEPHNQCVIHPMQNRVLSVRENARLQGFPDCYKLCGTIKEKYIQVGNAVAVPVGVALGYAFGMASQGLTDDEPVIKLPFKYPECMQAKDQI

SEQ ID NO: 620 - protein, 1295 aa, Arabidopsis sp.
MLSPAKCESEEAQAPLDLHSSSRSEPECLSLVLWCPNPEEAAPSSTRELIKLPDNGEMSLRRSTTLNCNSPEENGGEGRVSQRKSSRGKSQPLLMLTNGCQLRRSPRFRALHANFDNVCSVPVTKGGVSQRKFSRGKSQPLLTLTNGCQLRRSPRFRAVDGNFDSVCSVPVTGKFGSRKRKSNSALDKKESSDSEGLTFKDIAVIAKSLEMEIISECQYKNNVAEGRSRLQDPAKRKVDSDTLLYSSINSSKQSLGSNKRMRRSQRFMKGTENEGEENLGKSKGKGMSLASCSFRRSTRLSGTVETGNTETLNRRKDCGPALCGAEQVRGTERLVQISKKDHCCEAMKKCEGDGLVSSKQELLVFPSGCIKKTVNGCRDRTLGKPRSSGLNTDDIHTSSLKISKNDTSNGLTMTTALVEQDAMESLLQGKTSACGAADKGKTREMHVNSTVIYLSDSDEPSSIEYLNGDNLTQVESGSALSSGGNEGIVSLDLNNPTKSTKRKGKRVTRTAVQEQNKRSICFFIGEPLSCEEAQERWRWRYELKERKSKSRGQQSEDDEDKIVANVECHYSQAKVDGHTFSLGDFAYIKGEEEETHVGQIVEFFKTTDGESYFRVQWFYRATDTIMERQATNHDKRRLFYSTVMNDNPVDCLISKVTVLQVSPRVGLKPNSIKSDYYFDMEYCVEYSTFQTLRNPKTSENKLECCADVVPTESTESILKKKSFSGELPVLDLYSGCGGMSTGLSLGAKISGVDVVTKWAVDQNTAACKSLKLNHPNTQVRNDAAGDFLQLLKEWDKLCKRYVFNNDQRTDTLRSVNSTKETSGSSSSSDDDSDSEEYEVEKLVDICFGDHDKTGKNGLKFKVHWKGYRSDEDTWELAEELSNCQDAIREFVTSGFKSKILPLPGRVGVICGGPPCQGISGYNRHRNVDSPLNDERNQQIIVFMDIVEYLKPSYVLMENVVDILRMDKGSLGRYALSRLVNMRYQARLGIMTAGCYGLSQFRSRVFMWGAVPNKNLPPFPLPTHDVIVRYGLPLEFERNVVAYAEGQPRKLEKALVLKDAISDLPHVSNDEDREKLPYESLPKTDFQRYIRSTKRDLTGSAIDNCNKRTMLLHDHRPFHINEDDYARVCQIPKRKGANFRDLPGLIVRNNTVCRDPSMEPVILPSGKPLVPGYVFTFQQGKSKRPFARLWWDETVPTVLTVPTCHSQALLHPEQDRVLTIRESARLQGFPDYFQFCGTIKERYCQIGNAVAVSVSRALGYSLGMAFRGLARDEHLIKLPQNFSHSTYPQLQETIPH

SEQ ID NO: 621 - protein, 839 aa, Arabidopsis sp.
MAPKRKRPATKDDTTKSIPKPKKRAPKRAKTVKEEPVTVVEEGEKHVARFLDEPIPESEAKSTWPDRYKPIEVQPPKASSRKKTKDDEKVEIIRARCHYRRAIVDERQIYELNDDAYVQSGEGKDPFICKIIEMFEGANGKLYFTARWFYRPSDTVMKEFEILIKKKRVFFSEIQDTNELGLLEKKLNILMIPLNENTKETIPATENCDFFCDMNYFLPYDTFEAIQQETMMAISESSTISSDTDIREGAAAISEIGECSQETEGHKKATLLDLYSGCGAMSTGLCMGAQLSGLNLVTKWAVDMNAHACKSLQHNHPETNVRNMTAEDFLFLLKEWEKLCIHFSLRNSPNSEEYANLHGLNNVEDNEDVSEESENEDDGEVFTVDKIVGISFGVPKKLLKRGLYLKVRWLNYDDSHDTWEPIEGLSNCRGKIEEFVKLGYKSGILPLPGGVDVVCGGPPCQGISGHNRFRNLLDPLEDQKNKQLLVYMNIVEYLKPKFVLMENVVDMLKMAKGYLARFAVGRLLQMNYQVRNGMMAAGAYGLAQFRLRFFLWGALPSEIIPQFPLPTHDLVHRGNIVKEFQGNIVAYDEGHTVKLADKLLLKDVISDLPAVANSEKRDEITYDKDPTTPFQKFIRLRKDEASGSQSKSKSKKHVLYDHHPLNLNINDYERVCQVPKRKGANFRDFPGVIVGPGNVVKLEEGKERVKLESGKTLVPDYALTYVDGKSCKPFGRLWWDEIVPTVVTRAEPHNQVIIHPEQNRVLSIRENARLQGFPDDYKLFGPPKQKYIQVGNAVAVPVAKALGYALGTAFQGLAVGKDPLLTLPEGFAFMKPTLPSELA

SEQ ID NO: 622 - protein, 142 aa, unidentified
  source 1..142: note = Neurospora
MAEQNPFVIDDEDDVIQIHDEEEVEEEVAEVIDITEDDIEPSELDRAFGSRPKEETLPSLLLRDQGFIVRPGMTVELKAPIGRFAISFVRVNSIVKVRQAHVNNVTIRGHGFTRAKEMNGMLPKQLNECCLVASIDTRDPRP

SEQ ID NO: 623 - protein, 529 aa, Escherichia coli
  source 1..529: note = Strain 12
MNNNDLVAKLWKLCDNLRDGGVSYQNYVNELASLLFLKMCKETGQEAEYLPEGYRWDDLKSRIGQEQLQFYRKMLVHLGEDDKKLVQAVFHNVSTTITEPKQITALVSNMDSLDWYNGAHGKSRDDFGDMYEGLLQKNANETKSGAGQYFTPRPLIKTIIHLLKPQPREVVQDPAAGTAGFLIEADRYVKSQTNDLDDLDGDTQDFQIHRAFIGLELVPGTRRLALMNCLLHDIEGNLDHGGAIRLGNTLGSDGENLPKAHIVATNPPFGSAAGTNITRTFVHPTSNKQLCFMQHIIETLHPGGRAAVVVPDNVLFEGGKGTDIRRDLMDKCHLHTILRLPTGIFYAQGVKTNVLFFTKGTVANPNQDKNCTDDVWVYDLRTNMPSFGKRTPFTDEHLQPFERVYGEDPHGLSPRTEGEWSFNAEETEVADSEENKNTDQHLATSRWRKFSREWIRTAKSDSLDISWLKDKDSIDADSLPEPDVLAAEAMGELVQALSELDALMRELGASDEADLQRQLLEEAFGGVKE

SEQ ID NO: 624 - protein, 464 aa, unidentified
  source 1..464: note = Escherichia coli Strain 12
MSAGKLPEGWVIAPVSTVTTLIRGVTYKKEQAINYLKDDYLPLIRANNIQNGKFDTTDLVFVPKNLVKESQKISPEDIVIAMSSGSKSVVGKSAHQHLPFECSFGAFCGVLRPEKLIFSGFIAHFTKSSLYRNKISSLSAGANINNIKPASFDLINIPIPPLAEQKIIAEKLDTLLAQVDSTKARFEQIPQILKRFRQAVLGGAVNGKLTEKWRNFEPQHSVFKKLNFESILTELRNGLSSKPNESGVGHPILRISSVRAGHVDQNDIRFLECSESELNRHKLQDGDLLFTRYNGSLEFVGVCGLLKKLQHQNLLYPDKLIRARLTKDALPEYIEIFFSSPSARNAMMNCVKTTSGQKGISGKDIKSQVVLLPPVKEQAEIVRRVEQLFAYADTIEKQVNNALARVNNLTQSILAKAFRGELTAQWRAENPDLISGENSAAALLEKIKAERAASGGKKASRKKS

SEQ ID NO: 625 - protein, 421 aa, Thermus aquaticus
MGLPPLLSLPSNSAPRSLGRVETPPEVVDFMVSLAEAPRGGRVLEPACAHGPFLRAFREAHGTAYRFVGVEIDPKALDLPPWAEGILADFLLWEPGEAFDLILGNPPYGIVGEASKYPIHVFKAVKDLYKKAFSTWKGKYNLYGAFLEKAVRLLKPGGVLVFVVPATWLVLEDFALLREFLAREGKTSVYYLGEVFPQKKVSAVVIRFQKSGKGLSLWDTQESESGFTPILWAEYPHWEGEIIRFETEETRKLEISGMPLGDLFHIRFAARSPEFKKHPAVRKEPGPGLVPVLTGRNLKPGWVDYEKNHSGLWMPKERAKELRDFYATPHLVVAHTKGTRVVAAWDERAYPWREEFHLLPKEGVRLDPSSLVQWLNSEAMQKHVRTLYRDFVPHLTLRMLERLPVRREYGFHTSPESARNF

SEQ ID NO: 626 - protein, 278 aa, Escherichia coli
MKKNRAFLKWAGGKYPLLDDIKRHLPKGECLVEPFVGAGSVFLNTDFSRYILADINSDLISLYNIVKMRTDEYVQAARELFVPETNCAEVYYQFREEFNKSQDPFRRAVLFLYLNRYGYNGLCRYNLRGEFNVPFGRYKKPYFPEAELYHFAEKAQNAFFYCESYADSMARADDASVVYCDPPYAPLSATANFTAYHTNSFTLEQQAHLAEIAEGLVERHIPVLISNHDTMLTREWYQRAKLHVVKVRRSISSNGGTRKKVDELLALYKPGVVSPAKK

SEQ ID NO: 627 - protein, 358 aa, unidentified
  source 1..358: note = Caulobacter crescentus
MKFGPETIIHGDCIEQMNALPEKSVDLIFADPPYNLQLGGDLLRPDNSKVDAVDDHWDQFESFAAYDKFTREWLKAARRVLKDDGAIWVIGSYHNIFRVGVAVQDLGFWILNDIVWRKSNPMPNFKGTRFANAHETLIWASKSQNAKRYTFNYDALKMANDEVQMRSDWTIPLCTGEERIKGADGQKAHPTQKPEALLYRVILSTTKPGDVILDPFFGVGTTGAAAKRLGRKFIGIEREAEYLEHAKARIAKVVPIAPEDLDVMGSKRAEPRVPFGTIVEAGLLSPGDTLYCSKGTHVAKVRPDGSITVGDLSGSIHKIGALVQSAPACNGWTYWHFKTDAGLAPIDVLRAQVRAGMN

SEQ ID NO: 628 - protein, 577 aa, unidentified
  source 1..577: note = Clostridioides difficile
MDDISQDNFLLSKEYENSLDVDTKKASGIYYTPKIIVDYIVKKTLKNHDIIKNPYPRILDISCGCGNFLLEVYDILYDLFEENIYELKKKYDENYWTVDNIHRHILNYCIYGADIDEKAISILKDSLTNKKVVNDLDESDIKINLFCCDSLKKKWRYKFDYIVGNPPYIGHKKLEKKYKKFLLEKYSEVYKDKADLYFCFYKKIIDILKQGGIGSVITPRYFLESLSGKDLREYIKSNVNVQEIVDFLGANIFKNIGVSSCILTFDKKKTKETYIDVFKIKNEDICINKFETLEELLKSSKFEHFNINQRLLSDEWILVNKDDETFYNKIQEKCKYSLEDIAISFQGIITGCDKAFILSKDDVKLNLVDDKFLKCWIKSKNINKYIVDKSEYRLIYSNDIDNENTNKRILDEIIGLYKTKLENRRECKSGIRKWYELQWGREKLFFERKKIMYPYKSNENRFAIDYDNNFSSADVYSFFIKEEYLDKFSYEYLVGILNSSVYDKYFKITAKKMSKNIYDYYPNKVMKIRIFRDNNYEEIENLSKQIISILLNKSIDKGKVEKLQIKMDNLIMDSLGI

SEQ ID NO: 629 - protein, 835 aa, Synthetic construct
MAASAAAASAAAASAASGSPGPGEGSAGGEKRSTAPSAAASASASAAASSPAGGGAEALELLEHCGVCRERLRPEREPRLLPCLHSACSACLGPAAPAAANSSGDGGAAGDGTVVDCPVCKQQCFSKDIVENYFMRDSGSKAATDAQDANQCCTSCEDNAPATSYCVECSEPLCETCVEAHQRVKYTKDHTVRSTGPAKSRDGERTVYCNVHKHEPLVLFCESCDTLTCRDCQLNAHKDHQYQFLEDAVRNQRKLLASLVKRLGDKHATLQKSTKEVRSSIRQVSDVQKRVQVDVKMAILQIMKELNKRGRVLVNDAQKVTEGQQERLERQHWTMTKIQKHQEHILRFASWALESDNNTALLLSKKLIYFQLHRALKMIVDPVEPHGEMKFQWDLNAWTKSAEAFGKIVAERPGTNSTGPAPMAPPRAPGPLSKQGSGSSQPMEVQEGYGFGSGDDPYSSAEPHVSGVKRSRSGEGEVSGLMRKVPRVSLERLDLDLTADSQPPVFKVFPGSTTEDYNLIVIERGAAAAATGQPGTAPAGTPGAPPLAGMAIVKEEETEAAIGAPPTATEGPETKPVLMALAEGPGAEGPRLASPSGSTSSGLEVVAPEGTSAPGGGPGTLDDSATICRVCQKPGDLVMCNQCEFCFHLDCHLPALQDVPGEEWSCSLCHVLPDLKEEDGSLSLDGADSTGVVAKLSPANQRKCERVLLALFCHEPCRPLHQLATDSTFSLDQPGGTLDLTLIRARLQEKLSPPYSSPQEFAQDVGRMFKQFNKLTEDKADVQSIIGLQRFFETRMNEAFGDTKFSAVLVEPPPMSLPGAGLSSQELSGGPGDGP

SEQ ID NO: 630 - protein, 486 aa, Synthetic construct
MVAGMLGLREEKSEDQDLQGLKDKPLKFKKVKKDKKEEKEGKHEPVQPSAHHSAEPAEAGKAETSEGSGSAPAVPEASASPKQRRSIIRDRGPMYDDPTLPEGWTRKLKQRKSGRSAGKYDVYLINPQGKAFRSKVELIAYFEKVGDTSLDPNDFDFTVTGRGSPSRREQKPPKKPKSPKAPGTGRGRGRPKGSGTTRPKAATSEGVQVKRVLEKSPGKLLVKMPFQTSPGGKAEGGGATTSTQVMVIKRPGRKRKAEADPQAIPKKRGRKPGSVVAAAAAEAKKKAVKESSIRSVQETVLPIKKRKTRETVSIEVKEVVKPLLVSTLGEKSGKGLKTCKSPGRKSKESSPKGRSSSASSPPKKEHHHHHHHSESPKAPVPLLPPLPPPPPEPESSEDPTSPPEPQDLSSSVCKEEKMPRGGSLESDGCPKEPAKTQPAVATAATAAEKYKHRGEGERKDIVSSSMPRPNREEPVDSRTPVTERVS

SEQ ID NO: 631 - protein, 4 aa, Synthetic construct
SGGS

SEQ ID NO: 632 - protein, 24 aa, Synthetic construct
SGGSSGSETPGTSESATPESSGGS

SEQ ID NO: 633 - protein, 32 aa, Synthetic construct
SGGSSGGSSGSETPGTSESATPESSGGSSGGS

SEQ ID NO: 634 - protein, 104 aa, Synthetic construct
GGSGGSPGSPAGSPTSTEEGTSESATPESGPGTSTEPSEGSAPGSPAGSPTSTEEGTSTEPSEGSAPGTSTEPSEGSAPGTSESATPESGPGSEPATSGGSGGS

SEQ ID NO: 635 - protein, 5 aa, Synthetic construct
GSGGG

SEQ ID NO: 636 - protein, 20 aa, Synthetic construct
GGGGSGGGGSGGGGSGGGGS

SEQ ID NO: 637 - protein, 27 aa, Synthetic construct
SSGNSNANSRGPSFSSGLVPLSLRGSH

SEQ ID NO: 638 - protein, 16 aa, Synthetic construct
SGSETPGTSESATPES

SEQ ID NO: 639 - protein, 24 aa, Synthetic construct
SGGSSGGSSGSETPGTSESATPES

SEQ ID NO: 640 - protein, 40 aa, Synthetic construct
SGGSSGGSSGSETPGTSESATPESSGGSSGGSSGGSSGGS

SEQ ID NO: 641 - protein, 64 aa, Synthetic construct
SGGSSGGSSGSETPGTSESATPESSGGSSGGSSGGSSGGSSGSETPGTSESATPESSGGSSGGS

SEQ ID NO: 642 - protein, 92 aa, Synthetic construct
PGSPAGSPTSTEEGTSESATPESGPGTSTEPSEGSAPGSPAGSPTSTEEGTSTEPSEGSAPGTSTEPSEGSAPGTSESATPESGPGSEPATS

SEQ ID NO: 643 - protein, 80 aa, Synthetic construct
GGPSSGAPPPSGGSPAGSPTSTEEGTSESATPESGPGTSTEPSEGSAPGSPAGSPTSTEEGTSTEPSEGSAPGTSTEPSE

SEQ ID NO: 644 - protein, 7 aa, Synthetic construct
PKKKRKV

SEQ ID NO: 645 - protein, 20 aa, Synthetic construct
AVKRPAATKKAGQAKKKKLD

SEQ ID NO: 646 - protein, 25 aa, Synthetic construct
MSRRRKANPTKLSENAKKLAKEVEN

SEQ ID NO: 647 - protein, 9 aa, Synthetic construct
PAAKRVKLD

SEQ ID NO: 648 - protein, 9 aa, Synthetic construct
KLKIKRPVK

SEQ ID NO: 649 - protein, 30 aa, Synthetic construct
MDSLLMNRRKFLYQFKNVRWAKGRRETYLC

SEQ ID NO: 650 - protein, 665 aa, Synthetic construct
  VARIANT 64..308: note = may be absent
  VARIANT 365..609: note = may be absent
  VARIANT 27..28: note = may be TR, LR or LK
  VARIANT 55..56: note = may be TR, LR or LK
  VARIANT 328..329: note = may be TR, LR or LK
  VARIANT 356..357: note = may be TR, LR or LK
  VARIANT 630..631: note = may be TR, LR or LK
  VARIANT 658..659: note = may be TR, LR or LK
SRPGERPFQCRICMRNFSXXXXXXXHXXTHTGEKPFQCRICMRNFSXXXXXXXHXXTHXXXXXXXXXXXXXXXXXXXXXXXXXXXXXXXXXXXXXXXXXXXXXXXXXXXXXXXXXXXXXXXXXXXXXXXXXXXXXXXXXXXXXXXXXXXXXXXXXXXXXXXXXXXXXXXXXXXXXXXXXXXXXXXXXXXXXXXXXXXXXXXXXXXXXXXXXXXXXXXXXXXXXXXXXXXXXXXXXXXXXXXXXXXXXXXXXXXXXXXXXXXXXXXXXXXXXXXXXXXXXXXXXXXXXXXXXXXXXXXXXXXXXXXXXXFQCRICMRNFSXXXXXXXHXXTHTGEKPFQCRICMRNFSXXXXXXXHXXTHXXXXXXXXXXXXXXXXXXXXXXXXXXXXXXXXXXXXXXXXXXXXXXXXXXXXXXXXXXXXXXXXXXXXXXXXXXXXXXXXXXXXXXXXXXXXXXXXXXXXXXXXXXXXXXXXXXXXXXXXXXXXXXXXXXXXXXXXXXXXXXXXXXXXXXXXXXXXXXXXXXXXXXXXXXXXXXXXXXXXXXXXXXXXXXXXXXXXXXXXXXXXXXXXXXXXXXXXXXXXXXXXXXXXXXXXXXXXXXXXXXXXXXXXXXPFQCRICMRNFSXXXXXXXHXXTHTGEKPFQCRICMRNFSXXXXXXXHXXTHLRGS

SEQ ID NO: 651 - protein, 6 aa, Synthetic construct
TGSQKP

SEQ ID NO: 652 - protein, 9 aa, Synthetic construct
TGGGGSQKP

SEQ ID NO: 653 - RNA, 93 nt, Synthetic construct
  source 1..93: mol_type = other RNA
gtttaagagctatgctggaaacagcatagcaagtttaaataaggctagtccgttatcaacttgaaaaagtggcaccgagtcggtgcttttttt

SEQ ID NO: 654 - RNA, 80 nt, Synthetic construct
  source 1..80: mol_type = other RNA
gttttagagctagaaatagcaagttaaaataaggctagtccgttatcaacttgaaaaagtggcaccgagtcggtgctttt

SEQ ID NO: 655 - RNA, 92 nt, Synthetic construct
  source 1..92: mol_type = other RNA
gtttaagagctaagctggaaacagcatagcaagtttaaataaggctagtccgttatcaacttgaaaaagtggcaccgagtcggtgctttttt

SEQ ID NO: 656 - RNA, 93 nt, Synthetic construct
  source 1..93: mol_type = other RNA
gtttaagagctaagctggaaacagcatagcaagtttaaataaggctagtccgttatcaacttgaaaaagtggcaccgagtcggtgcttttttt

SEQ ID NO: 657 - protein, 7 aa, Synthetic construct
  VARIANT 2: note = may be repeated between 2 and 4 times
  VARIANT 4: note = may be repeated 12 times
  VARIANT 6: note = may be repeated between 3 and 5 times
CXCXHXH

SEQ ID NO: 658 - protein, 2087 aa, Synthetic construct
MNHDQEFDPPKVYPPVPAEKRKPIRVLSLFDGIATGLLVLKDLGIQVDRYIASEVCEDSITVGMVRHQGKIMYVGDVRSVTQKHIQEWGPFDLVIGGSPCNDLSIVNPARKGLYEGTGRLFFEFYRLLHDARPKEGDDRPFFWLFENVVAMGVSDKRDISRFLESNPVMIDAKEVSAAHRARYFWGNLPGMNRPLASTVNDKLELQECLEHGRIAKFSKVRTITTRSNSIKQGKDQHFPVFMNEKEDILWCTEMERVFGFPVHYTDVSNMSRLARQRLLGRSWSVPVIRHLFAPLKEYFACVSSGNSNANSRGPSFSSGLVPLSLRGSHMGPMEIYKTVSAWKRQPVRVLSLFRNIDKVLKSLGFLESGSGSGGGTLKYVEDVTNVVRRDVEKWGPFDLVYGSTQPLGSSCDRCPGWYMFQFHRILQYALPRQESQRPFFWIFMDNLLLTEDDQETTTRFLQTEAVTLQDVRGRDYQNAMRVWSNIPGLKSKHAPLTPKEEEYLQAQVRSRSKLDAPKVDLLVKNCLLPLREYFKYFSQNSLPLGGPSSGAPPPSGGSPAGSPTSTEEGTSESATPESGPGTSTEPSEGSAPGSPAGSPTSTEEGTSTEPSEGSAPGTSTEPSEPKKKRKVYMDKKYSIGLAIGTNSVGWAVITDEYKVPSKKFKVLGNTDRHSIKKNLIGALLFDSGETAEATRLKRTARRRYTRRKNRICYLQEIFSNEMAKVDDSFFHRLEESFLVEEDKKHERHPIFGNIVDEVAYHEKYPTIYHLRKKLVDSTDKADLRLIYLALAHMIKFRGHFLIEGDLNPDNSDVDKLFIQLVQTYNQLFEENPINASGVDAKAILSARLSKSRRLENLIAQLPGEKKNGLFGNLIALSLGLTPNFKSNFDLAEDAKLQLSKDTYDDDLDNLLAQIGDQYADLFLAAKNLSDAILLSDILRVNTEITKAPLSASMIKRYDEHHQDLTLLKALVRQQLPEKYKEIFFDQSKNGYAGYIDGGASQEEFYKFIKPILEKMDGTEELLVKLNREDLLRKQRTFDNGSIPHQIHLGELHAILRRQEDFYPFLKDNREKIEKILTFRIPYYVGPLARGNSRFAWMTRKSEETITPWNFEEVVDKGASAQSFIERMTNFDKNLPNEKVLPKHSLLYEYFTVYNELTKVKYVTEGMRKPAFLSGEQKKAIVDLLFKTNRKVTVKQLKEDYFKKIECFDSVEISGVEDRFNASLGTYHDLLKIIKDKDFLDNEENEDILEDIVLTLTLFEDREMIEERLKTYAHLFDDKVMKQLKRRRYTGWGRLSRKLINGIRDKQSGKTILDFLKSDGFANRNFMQLIHDDSLTFKEDIQKAQVSGQGDSLHEHIANLAGSPAIKKGILQTVKVVDELVKVMGRHKPENIVIEMARENQTTQKGQKNSRERMKRIEEGIKELGSQILKEHPVENTQLQNEKLYLYYLQNGRDMYVDQELDINRLSDYDVDAIVPQSFLKDDSIDNKVLTRSDKNRGKSDNVPSEEVVKKMKNYWRQLLNAKLITQRKFDNLTKAERGGLSELDKAGFIKRQLVETRQITKHVAQILDSRMNTKYDENDKLIREVKVITLKSKLVSDFRKDFQFYKVREINNYHHAHDAYLNAVVGTALIKKYPKLESEFVYGDYKVYDVRKMIAKSEQEIGKATAKYFFYSNIMNFFKTEITLANGEIRKRPLIETNGETGEIVWDKGRDFATVRKVLSMPQVNIVKKTEVQTGGFSKESILPKRNSDKLIARKKDWDPKKYGGFDSPTVAYSVLVVAKVEKGKSKKLKSVKELLGITIMERSSFEKNPIDFLEAKGYKEVKKDLIIKLPKYSLFELENGRKRMLASAGELQKGNELALPSKYVNFLYLASHYEKLKGSPEDNEQKQLFVEQHKHYLDEIIEQISEFSKRVILADANLDKVLSAYNKHRDKPIREQAENIIHLFTLTNLGAPAAFKYFDTTIDRKRYTSTKEVLDATLIHQSITGLYETRIDLSQLGGDPKKKRKVSGSETPGTSESATPESTGRTLVTFKDVFVDFTREEWKLLDTAQQIVYRNVMLENYKNLVSLGYQLTKPDVILRLEKGEEP

SEQ ID NO: 659 - protein, 1385 aa, Synthetic construct
  VARIANT 696..940: note = may be absent
  VARIANT 998..1242: note = may be absent
  VARIANT 659..660: note = may be TR, LR or LK
  VARIANT 687..688: note = may be TR, LR or LK
  VARIANT 961..962: note = may be TR, LR or LK
  VARIANT 989..990: note = may be TR, LR or LK
  VARIANT 1263..1264: note = may be TR, LR or LK
  VARIANT 1291..1292: note = may be TR, LR or LK
MNHDQEFDPPKVYPPVPAEKRKPIRVLSLFDGIATGLLVLKDLGIQVDRYIASEVCEDSITVGMVRHQGKIMYVGDVRSVTQKHIQEWGPFDLVIGGSPCNDLSIVNPARKGLYEGTGRLFFEFYRLLHDARPKEGDDRPFFWLFENVVAMGVSDKRDISRFLESNPVMIDAKEVSAAHRARYFWGNLPGMNRPLASTVNDKLELQECLEHGRIAKFSKVRTITTRSNSIKQGKDQHFPVFMNEKEDILWCTEMERVFGFPVHYTDVSNMSRLARQRLLGRSWSVPVIRHLFAPLKEYFACVSSGNSNANSRGPSFSSGLVPLSLRGSHMGPMEIYKTVSAWKRQPVRVLSLFRNIDKVLKSLGFLESGSGSGGGTLKYVEDVTNVVRRDVEKWGPFDLVYGSTQPLGSSCDRCPGWYMFQFHRILQYALPRQESQRPFFWIFMDNLLLTEDDQETTTRFLQTEAVTLQDVRGRDYQNAMRVWSNIPGLKSKHAPLTPKEEEYLQAQVRSRSKLDAPKVDLLVKNCLLPLREYFKYFSQNSLPLGGPSSGAPPPSGGSPAGSPTSTEEGTSESATPESGPGTSTEPSEGSAPGSPAGSPTSTEEGTSTEPSEGSAPGTSTEPSEPKKKRKVYSRPGERPFQCRICMRNFSXXXXXXXHXXTHTGEKPFQCRICMRNFSXXXXXXXHXXTHXXXXXXXXXXXXXXXXXXXXXXXXXXXXXXXXXXXXXXXXXXXXXXXXXXXXXXXXXXXXXXXXXXXXXXXXXXXXXXXXXXXXXXXXXXXXXXXXXXXXXXXXXXXXXXXXXXXXXXXXXXXXXXXXXXXXXXXXXXXXXXXXXXXXXXXXXXXXXXXXXXXXXXXXXXXXXXXXXXXXXXXXXXXXXXXXXXXXXXXXXXXXXXXXXXXXXXXXXXXXXXXXXXXXXXXXXXXXXXXXXXXXXXXXXXPFQCRICMRNFSXXXXXXXHXXTHTGEKPFQCRICMRNFSXXXXXXXHXXTHXXXXXXXXXXXXXXXXXXXXXXXXXXXXXXXXXXXXXXXXXXXXXXXXXXXXXXXXXXXXXXXXXXXXXXXXXXXXXXXXXXXXXXXXXXXXXXXXXXXXXXXXXXXXXXXXXXXXXXXXXXXXXXXXXXXXXXXXXXXXXXXXXXXXXXXXXXXXXXXXXXXXXXXXXXXXXXXXXXXXXXXXXXXXXXXXXXXXXXXXXXXXXXXXXXXXXXXXXXXXXXXXXXXXXXXXXXXXXXXXXXXXXXXXXXPFQCRICMRNFSXXXXXXXHXXTHTGEKPFQCRICMRNFSXXXXXXXHXXTHLRGSPKKKRKVSGSETPGTSESATPESTGRTLVTFKDVFVDFTREEWKLLDTAQQIVYRNVMLENYKNLVSLGYQLTKPDVILRLEKGEEP

SEQ ID NO: 660 - protein, 2298 aa, Synthetic construct
MGTMPKKKRKVPKKKRKVYNHDQEFDPPKVYPPVPAEKRKPIRVLSLFDGIATGLLVLKDLGIQVDRYIASEVCEDSITVGMVRHQGKIMYVGDVRSVTQKHIQEWGPFDLVIGGSPCNDLSIVNPARKGLYEGTGRLFFEFYRLLHDARPKEGDDRPFFWLFENVVAMGVSDKRDISRFLESNPVMIDAKEVSAAHRARYFWGNLPGMNRPLASTVNDKLELQECLEHGRIAKFSKVRTITTRSNSIKQGKDQHFPVFMNEKEDILWCTEMERVFGFPVHYTDVSNMSRLARQRLLGRSWSVPVIRHLFAPLKEYFACVSSGNSNANSRGPSFSSGLVPLSLRGSHMAAIPALDPEAEPSMDVILVGSSELSSSVSPGTGRDLIAYEVKANQRNIEDICICCGSLQVHTQHPLFEGGICAPCKDKFLDALFLYDDDGYQSYCSICCSGETLLICGNPDCTRCYCFECVDSLVGPGTSGKVHAMSNWVCYLCLPSSRSGLLQRRRKWRSQLKAFYDRESENPLEMFETVPVWRRQPVRVLSLFEDIKKELTSLGFLESGSDPGQLKHVVDVTDTVRKDVEEWGPFDLVYGATPPLGHTCDRPPSWYLFQFHRLLQYARPKPGSPRPFFWMFVDNLVLNKEDLDVASRFLEMEPVTIPDVHGGSLQNAVRVWSNIPAIRSRHWALVSEEELSLLAQNKQSSKLAAKWPTKLVKNCFLPLREYFKYFSTELTSSLGGPSSGAPPPSGGSPAGSPTSTEEGTSESATPESGPGTSTEPSEGSAPGSPAGSPTSTEEGTSTEPSEGSAPGTSTEPSELEDKKYSIGLAIGTNSVGWAVITDEYKVPSKKFKVLGNTDRHSIKKNLIGALLFDSGETAEATRLKRTARRRYTRRKNRICYLQEIFSNEMAKVDDSFFHRLEESFLVEEDKKHERHPIFGNIVDEVAYHEKYPTIYHLRKKLVDSTDKADLRLIYLALAHMIKFRGHFLIEGDLNPDNSDVDKLFIQLVQTYNQLFEENPINASGVDAKAILSARLSKSRRLENLIAQLPGEKKNGLFGNLIALSLGLTPNFKSNFDLAEDAKLQLSKDTYDDDLDNLLAQIGDQYADLFLAAKNLSDAILLSDILRVNTEITKAPLSASMIKRYDEHHQDLTLLKALVRQQLPEKYKEIFFDQSKNGYAGYIDGGASQEEFYKFIKPILEKMDGTEELLVKLNREDLLRKQRTFDNGSIPHQIHLGELHAILRRQEDFYPFLKDNREKIEKILTFRIPYYVGPLARGNSRFAWMTRKSEETITPWNFEEVVDKGASAQSFIERMTNFDKNLPNEKVLPKHSLLYEYFTVYNELTKVKYVTEGMRKPAFLSGEQKKAIVDLLFKTNRKVTVKQLKEDYFKKIECFDSVEISGVEDRFNASLGTYHDLLKIIKDKDFLDNEENEDILEDIVLTLTLFEDREMIEERLKTYAHLFDDKVMKQLKRRRYTGWGRLSRKLINGIRDKQSGKTILDFLKSDGFANRNFMQLIHDDSLTFKEDIQKAQVSGQGDSLHEHIANLAGSPAIKKGILQTVKVVDELVKVMGRHKPENIVIEMARENQTTQKGQKNSRERMKRIEEGIKELGSQILKEHPVENTQLQNEKLYLYYLQNGRDMYVDQELDINRLSDYDVDAIVPQSFLKDDSIDNKVLTRSDKNRGKSDNVPSEEVVKKMKNYWRQLLNAKLITQRKFDNLTKAERGGLSELDKAGFIKRQLVETRQITKHVAQILDSRMNTKYDENDKLIREVKVITLKSKLVSDFRKDFQFYKVREINNYHHAHDAYLNAVVGTALIKKYPKLESEFVYGDYKVYDVRKMIAKSEQEIGKATAKYFFYSNIMNFFKTEITLANGEIRKRPLIETNGETGEIVWDKGRDFATVRKVLSMPQVNIVKKTEVQTGGFSKESILPKRNSDKLIARKKDWDPKKYGGFDSPTVAYSVLVVAKVEKGKSKKLKSVKELLGITIMERSSFEKNPIDFLEAKGYKEVKKDLIIKLPKYSLFELENGRKRMLASAGELQKGNELALPSKYVNFLYLASHYEKLKGSPEDNEQKQLFVEQHKHYLDEIIEQISEFSKRVILADANLDKVLSAYNKHRDKPIREQAENIIHLFTLTNLGAPAAFKYFDTTIDRKRYTSTKEVLDATLIHQSITGLYETRIDLSQLGGDSPKKKRKVGVDGSSGSETPGTSESATPESRTLVTFKDVFVDFTREEWKLLDTAQQIVYRNVMLENYKNLVSLGYQLTKPDVILRLEKGEEPSADYKDDDDKAPKKKRKVPKKKRKV

SEQ ID NO: 661 - protein, 2318 aa, Synthetic construct
MGTMPKKKRKVPKKKRKVYNHDQEFDPPKVYPPVPAEKRKPIRVLSLFDGIATGLLVLKDLGIQVDRYIASEVCEDSITVGMVRHQGKIMYVGDVRSVTQKHIQEWGPFDLVIGGSPCNDLSIVNPARKGLYEGTGRLFFEFYRLLHDARPKEGDDRPFFWLFENVVAMGVSDKRDISRFLESNPVMIDAKEVSAAHRARYFWGNLPGMNRPLASTVNDKLELQECLEHGRIAKFSKVRTITTRSNSIKQGKDQHFPVFMNEKEDILWCTEMERVFGFPVHYTDVSNMSRLARQRLLGRSWSVPVIRHLFAPLKEYFACVSSGNSNANSRGPSFSSGLVPLSLRGSHMAAIPALDPEAEPSMDVILVGSSELSSSVSPGTGRDLIAYEVKANQRNIEDICICCGSLQVHTQHPLFEGGICAPCKDKFLDALFLYDDDGYQSYCSICCSGETLLICGNPDCTRCYCFECVDSLVGPGTSGKVHAMSNWVCYLCLPSSRSGLLQRRRKWRSQLKAFYDRESENPLEMFETVPVWRRQPVRVLSLFEDIKKELTSLGFLESGSDPGQLKHVVDVTDTVRKDVEEWGPFDLVYGATPPLGHTCDRPPSWYLFQFHRLLQYARPKPGSPRPFFWMFVDNLVLNKEDLDVASRFLEMEPVTIPDVHGGSLQNAVRVWSNIPAIRSRHWALVSEEELSLLAQNKQSSKLAAKWPTKLVKNCFLPLREYFKYFSTELTSSLGGPSSGAPPPSGGSPAGSPTSTEEGTSESATPESGPGTSTEPSEGSAPGSPAGSPTSTEEGTSTEPSEGSAPGTSTEPSELEDKKYSIGLAIGTNSVGWAVITDEYKVPSKKFKVLGNTDRHSIKKNLIGALLFDSGETAEATRLKRTARRRYTRRKNRICYLQEIFSNEMAKVDDSFFHRLEESFLVEEDKKHERHPIFGNIVDEVAYHEKYPTIYHLRKKLVDSTDKADLRLIYLALAHMIKFRGHFLIEGDLNPDNSDVDKLFIQLVQTYNQLFEENPINASGVDAKAILSARLSKSRRLENLIAQLPGEKKNGLFGNLIALSLGLTPNFKSNFDLAEDAKLQLSKDTYDDDLDNLLAQIGDQYADLFLAAKNLSDAILLSDILRVNTEITKAPLSASMIKRYDEHHQDLTLLKALVRQQLPEKYKEIFFDQSKNGYAGYIDGGASQEEFYKFIKPILEKMDGTEELLVKLNREDLLRKQRTFDNGSIPHQIHLGELHAILRRQEDFYPFLKDNREKIEKILTFRIPYYVGPLARGNSRFAWMTRKSEETITPWNFEEVVDKGASAQSFIERMTNFDKNLPNEKVLPKHSLLYEYFTVYNELTKVKYVTEGMRKPAFLSGEQKKAIVDLLFKTNRKVTVKQLKEDYFKKIECFDSVEISGVEDRFNASLGTYHDLLKIIKDKDFLDNEENEDILEDIVLTLTLFEDREMIEERLKTYAHLFDDKVMKQLKRRRYTGWGRLSRKLINGIRDKQSGKTILDFLKSDGFANRNFMQLIHDDSLTFKEDIQKAQVSGQGDSLHEHIANLAGSPAIKKGILQTVKVVDELVKVMGRHKPENIVIEMARENQTTQKGQKNSRERMKRIEEGIKELGSQILKEHPVENTQLQNEKLYLYYLQNGRDMYVDQELDINRLSDYDVDAIVPQSFLKDDSIDNKVLTRSDKNRGKSDNVPSEEVVKKMKNYWRQLLNAKLITQRKFDNLTKAERGGLSELDKAGFIKRQLVETRQITKHVAQILDSRMNTKYDENDKLIREVKVITLKSKLVSDFRKDFQFYKVREINNYHHAHDAYLNAVVGTALIKKYPKLESEFVYGDYKVYDVRKMIAKSEQEIGKATAKYFFYSNIMNFFKTEITLANGEIRKRPLIETNGETGEIVWDKGRDFATVRKVLSMPQVNIVKKTEVQTGGFSKESILPKRNSDKLIARKKDWDPKKYGGFDSPTVAYSVLVVAKVEKGKSKKLKSVKELLGITIMERSSFEKNPIDFLEAKGYKEVKKDLIIKLPKYSLFELENGRKRMLASAGELQKGNELALPSKYVNFLYLASHYEKLKGSPEDNEQKQLFVEQHKHYLDEIIEQISEFSKRVILADANLDKVLSAYNKHRDKPIREQAENIIHLFTLTNLGAPAAFKYFDTTIDRKRYTSTKEVLDATLIHQSITGLYETRIDLSQLGGDSPKKKRKVGVDGSSGSETPGTSESATPESTGNKKLEAVGTGIEPKAMSQGLVTFGDVAVDFSQEEWEWLNPIQRNLYRKVMLENYRNLASLGLCVSKPDVISSLEQGKEPWSADYKDDDDKAPKKKRKVPKKKRKV

SEQ ID NO: 662 - protein, 2318 aa, Synthetic construct
MGTMPKKKRKVPKKKRKVYNHDQEFDPPKVYPPVPAEKRKPIRVLSLFDGIATGLLVLKDLGIQVDRYIASEVCEDSITVGMVRHQGKIMYVGDVRSVTQKHIQEWGPFDLVIGGSPCNDLSIVNPARKGLYEGTGRLFFEFYRLLHDARPKEGDDRPFFWLFENVVAMGVSDKRDISRFLESNPVMIDAKEVSAAHRARYFWGNLPGMNRPLASTVNDKLELQECLEHGRIAKFSKVRTITTRSNSIKQGKDQHFPVFMNEKEDILWCTEMERVFGFPVHYTDVSNMSRLARQRLLGRSWSVPVIRHLFAPLKEYFACVSSGNSNANSRGPSFSSGLVPLSLRGSHMAAIPALDPEAEPSMDVILVGSSELSSSVSPGTGRDLIAYEVKANQRNIEDICICCGSLQVHTQHPLFEGGICAPCKDKFLDALFLYDDDGYQSYCSICCSGETLLICGNPDCTRCYCFECVDSLVGPGTSGKVHAMSNWVCYLCLPSSRSGLLQRRRKWRSQLKAFYDRESENPLEMFETVPVWRRQPVRVLSLFEDIKKELTSLGFLESGSDPGQLKHVVDVTDTVRKDVEEWGPFDLVYGATPPLGHTCDRPPSWYLFQFHRLLQYARPKPGSPRPFFWMFVDNLVLNKEDLDVASRFLEMEPVTIPDVHGGSLQNAVRVWSNIPAIRSRHWALVSEEELSLLAQNKQSSKLAAKWPTKLVKNCFLPLREYFKYFSTELTSSLGGPSSGAPPPSGGSPAGSPTSTEEGTSESATPESGPGTSTEPSEGSAPGSPAGSPTSTEEGTSTEPSEGSAPGTSTEPSELEDKKYSIGLAIGTNSVGWAVITDEYKVPSKKFKVLGNTDRHSIKKNLIGALLFDSGETAEATRLKRTARRRYTRRKNRICYLQEIFSNEMAKVDDSFFHRLEESFLVEEDKKHERHPIFGNIVDEVAYHEKYPTIYHLRKKLVDSTDKADLRLIYLALAHMIKFRGHFLIEGDLNPDNSDVDKLFIQLVQTYNQLFEENPINASGVDAKAILSARLSKSRRLENLIAQLPGEKKNGLFGNLIALSLGLTPNFKSNFDLAEDAKLQLSKDTYDDDLDNLLAQIGDQYADLFLAAKNLSDAILLSDILRVNTEITKAPLSASMIKRYDEHHQDLTLLKALVRQQLPEKYKEIFFDQSKNGYAGYIDGGASQEEFYKFIKPILEKMDGTEELLVKLNREDLLRKQRTFDNGSIPHQIHLGELHAILRRQEDFYPFLKDNREKIEKILTFRIPYYVGPLARGNSRFAWMTRKSEETITPWNFEEVVDKGASAQSFIERMTNFDKNLPNEKVLPKHSLLYEYFTVYNELTKVKYVTEGMRKPAFLSGEQKKAIVDLLFKTNRKVTVKQLKEDYFKKIECFDSVEISGVEDRFNASLGTYHDLLKIIKDKDFLDNEENEDILEDIVLTLTLFEDREMIEERLKTYAHLFDDKVMKQLKRRRYTGWGRLSRKLINGIRDKQSGKTILDFLKSDGFANRNFMQLIHDDSLTFKEDIQKAQVSGQGDSLHEHIANLAGSPAIKKGILQTVKVVDELVKVMGRHKPENIVIEMARENQTTQKGQKNSRERMKRIEEGIKELGSQILKEHPVENTQLQNEKLYLYYLQNGRDMYVDQELDINRLSDYDVDAIVPQSFLKDDSIDNKVLTRSDKNRGKSDNVPSEEVVKKMKNYWRQLLNAKLITQRKFDNLTKAERGGLSELDKAGFIKRQLVETRQITKHVAQILDSRMNTKYDENDKLIREVKVITLKSKLVSDFRKDFQFYKVREINNYHHAHDAYLNAVVGTALIKKYPKLESEFVYGDYKVYDVRKMIAKSEQEIGKATAKYFFYSNIMNFFKTEITLANGEIRKRPLIETNGETGEIVWDKGRDFATVRKVLSMPQVNIVKKTEVQTGGFSKESILPKRNSDKLIARKKDWDPKKYGGFDSPTVAYSVLVVAKVEKGKSKKLKSVKELLGITIMERSSFEKNPIDFLEAKGYKEVKKDLIIKLPKYSLFELENGRKRMLASAGELQKGNELALPSKYVNFLYLASHYEKLKGSPEDNEQKQLFVEQHKHYLDEIIEQISEFSKRVILADANLDKVLSAYNKHRDKPIREQAENIIHLFTLTNLGAPAAFKYFDTTIDRKRYTSTKEVLDATLIHQSITGLYETRIDLSQLGGDSPKKKRKVGVDGSSGSETPGTSESATPESTGDSVAFEDVAVNFTLEEWALLDPSQKNLYRDVMRETFRNLASVGKQWEDQNIEDPFKIPRRNISHIPERLCESKEGGQGEESADYKDDDDKAPKKKRKVPKKKRKV

SEQ ID NO: 663 - protein, 2338 aa, Synthetic construct
MGTMPKKKRKVPKKKRKVYNHDQEFDPPKVYPPVPAEKRKPIRVLSLFDGIATGLLVLKDLGIQVDRYIASEVCEDSITVGMVRHQGKIMYVGDVRSVTQKHIQEWGPFDLVIGGSPCNDLSIVNPARKGLYEGTGRLFFEFYRLLHDARPKEGDDRPFFWLFENVVAMGVSDKRDISRFLESNPVMIDAKEVSAAHRARYFWGNLPGMNRPLASTVNDKLELQECLEHGRIAKFSKVRTITTRSNSIKQGKDQHFPVFMNEKEDILWCTEMERVFGFPVHYTDVSNMSRLARQRLLGRSWSVPVIRHLFAPLKEYFACVSSGNSNANSRGPSFSSGLVPLSLRGSHMAAIPALDPEAEPSMDVILVGSSELSSSVSPGTGRDLIAYEVKANQRNIEDICICCGSLQVHTQHPLFEGGICAPCKDKFLDALFLYDDDGYQSYCSICCSGETLLICGNPDCTRCYCFECVDSLVGPGTSGKVHAMSNWVCYLCLPSSRSGLLQRRRKWRSQLKAFYDRESENPLEMFETVPVWRRQPVRVLSLFEDIKKELTSLGFLESGSDPGQLKHVVDVTDTVRKDVEEWGPFDLVYGATPPLGHTCDRPPSWYLFQFHRLLQYARPKPGSPRPFFWMFVDNLVLNKEDLDVASRFLEMEPVTIPDVHGGSLQNAVRVWSNIPAIRSRHWALVSEEELSLLAQNKQSSKLAAKWPTKLVKNCFLPLREYFKYFSTELTSSLGGPSSGAPPPSGGSPAGSPTSTEEGTSESATPESGPGTSTEPSEGSAPGSPAGSPTSTEEGTSTEPSEGSAPGTSTEPSELEDKKYSIGLAIGTNSVGWAVITDEYKVPSKKFKVLGNTDRHSIKKNLIGALLFDSGETAEATRLKRTARRRYTRRKNRICYLQEIFSNEMAKVDDSFFHRLEESFLVEEDKKHERHPIFGNIVDEVAYHEKYPTIYHLRKKLVDSTDKADLRLIYLALAHMIKFRGHFLIEGDLNPDNSDVDKLFIQLVQTYNQLFEENPINASGVDAKAILSARLSKSRRLENLIAQLPGEKKNGLFGNLIALSLGLTPNFKSNFDLAEDAKLQLSKDTYDDDLDNLLAQIGDQYADLFLAAKNLSDAILLSDILRVNTEITKAPLSASMIKRYDEHHQDLTLLKALVRQQLPEKYKEIFFDQSKNGYAGYIDGGASQEEFYKFIKPILEKMDGTEELLVKLNREDLLRKQRTFDNGSIPHQIHLGELHAILRRQEDFYPFLKDNREKIEKILTFRIPYYVGPLARGNSRFAWMTRKSEETITPWNFEEVVDKGASAQSFIERMTNFDKNLPNEKVLPKHSLLYEYFTVYNELTKVKYVTEGMRKPAFLSGEQKKAIVDLLFKTNRKVTVKQLKEDYFKKIECFDSVEISGVEDRFNASLGTYHDLLKIIKDKDFLDNEENEDILEDIVLTLTLFEDREMIEERLKTYAHLFDDKVMKQLKRRRYTGWGRLSRKLINGIRDKQSGKTILDFLKSDGFANRNFMQLIHDDSLTFKEDIQKAQVSGQGDSLHEHIANLAGSPAIKKGILQTVKVVDELVKVMGRHKPENIVIEMARENQTTQKGQKNSRERMKRIEEGIKELGSQILKEHPVENTQLQNEKLYLYYLQNGRDMYVDQELDINRLSDYDVDAIVPQSFLKDDSIDNKVLTRSDKNRGKSDNVPSEEVVKKMKNYWRQLLNAKLITQRKFDNLTKAERGGLSELDKAGFIKRQLVETRQITKHVAQILDSRMNTKYDENDKLIREVKVITLKSKLVSDFRKDFQFYKVREINNYHHAHDAYLNAVVGTALIKKYPKLESEFVYGDYKVYDVRKMIAKSEQEIGKATAKYFFYSNIMNFFKTEITLANGEIRKRPLIETNGETGEIVWDKGRDFATVRKVLSMPQVNIVKKTEVQTGGFSKESILPKRNSDKLIARKKDWDPKKYGGFDSPTVAYSVLVVAKVEKGKSKKLKSVKELLGITIMERSSFEKNPIDFLEAKGYKEVKKDLIIKLPKYSLFELENGRKRMLASAGELQKGNELALPSKYVNFLYLASHYEKLKGSPEDNEQKQLFVEQHKHYLDEIIEQISEFSKRVILADANLDKVLSAYNKHRDKPIREQAENIIHLFTLTNLGAPAAFKYFDTTIDRKRYTSTKEVLDATLIHQSITGLYETRIDLSQLGGDSPKKKRKVGVDGSSGSETPGTSESATPESTGMNNSQGRVTFEDVTVNFTQGEWQRLNPEQRNLYRDVMLENYSNLVSVGQGETTKPDVILRLEQGKEPWLEEEEVLGSGRAEKNGDIGGQIWKPKDVKESLSADYKDDDDKAPKKKRKVPKKKRKV

SEQ ID NO: 664 - protein, 5 aa, Synthetic construct
GGGGS

SEQ ID NO: 665 - protein, 5 aa, Synthetic construct
EAAAK

SEQ ID NO: 666 - protein, 461 aa, Synthetic construct
MDSVAFEDVAVNFTLEEWALLDPSQKNLYRDVMRETFRNLASVGKQWEDQNIEDPFKIPRRNISHIPERLCESKEGGQGEETFSQIPDGILNKKTPGVKPCESSVCGEVGMGPSSLNRHIRDHTGREPNEYQEYGKKSYTRNQCGRALSYHRSFPVRERTHPGGKPYDCKECGETFISLVSIRRHMLTHRGGVPYKCKVCGKAFDYPSLFRIHERSHTGEKPYECKQCGKAFSCSSYIRIHERTHTGDKPYECKQCGKAFSCSKYIRIHERTHTGEKPYECKQCGKAFRCASSVRSHERTHTGEKLFECKECGKALTCLASVRRHMIKHTGNGPYKCKVCGKAFDFPSSFRIHERTHTGEKPYDCKQCGKAFSCSSSFRKHERIHTGEKPYKCTKCGKAFSRSSYFRIHERTHTGEKPYECKQCGKAFSRSTYFRVHEKIHTGEKPYENPNPNASVVPVLS

SEQ ID NO: 667 - DNA, 20 bp, Synthetic construct
  source 1..20: mol_type = other DNA
ggcggaagtgctgcctgata

SEQ ID NO: 668 - DNA, 20 bp, Synthetic construct
  source 1..20: mol_type = other DNA
gcaacaccgcctagaccgac

SEQ ID NO: 669 - DNA, 20 bp, Synthetic construct
  source 1..20: mol_type = other DNA
ggaggttcagaaagcctaag

SEQ ID NO: 670 - DNA, 20 bp, Synthetic construct
  source 1..20: mol_type = other DNA
gcagcactagagtcccctca

SEQ ID NO: 671 - DNA, 20 bp, Synthetic construct
  source 1..20: mol_type = other DNA
gaacaactcgtgactggggt

SEQ ID NO: 672 - DNA, 20 bp, Synthetic construct
  source 1..20: mol_type = other DNA
gggagaggaggacaagcgcc

SEQ ID NO: 673 - DNA, 20 bp, Synthetic construct
  source 1..20: mol_type = other DNA
ggacccaccgacaccacgcc

SEQ ID NO: 674 - DNA, 20 bp, Synthetic construct
  source 1..20: mol_type = other DNA
cgcgggaaaatgcaagacga

SEQ ID NO: 675 - protein, 439 aa, unidentified
  source 1..439: note = M.AluI
MSKANAKYSFVDLFAGIGGFHAALAATGGVCEYAVEIDREAAAVYERNWNKPALGDITDDANDEGVTLRGYDGPIDVLTGGFPCQPFSKSGAQHGMAETRGTLFWNIARIIEEREPTVLILENVRNLVGPRHRHEWLTIIETLRFFGYEVSGAPAIFSPHLLPAWMGGTPQVRERVFITATLVPERMRDERSTIRRATGRPLEGFPYWADSWTDFRELSRLVVIRGFQAPEREVVGDRKRYVARTDMPEGFVPASVTRPAIDETLPAWKQSHLRRNYDFFERHFAEVVAWAYRWGVYTDLFPASRRKLEWQAQDAPRLWDTVMHFRPSGIRAKRPTYLPALVAITQTSIVGPLERRLSPRETARLQGLPEWFDFGEQRAAATYKQMGNGVNVGVVRHILREHVRRDRALLKLTPAGQRIINAVLADEPDATVGALGAAE

SEQ ID NO: 676 - DNA, 18 bp, Synthetic construct
  source 1..18: mol_type = other DNA
gatggggctctggtggcg

SEQ ID NO: 677 - protein, 176 aa, Synthetic construct
SRPGERPFQCRICMRNFSRTDTLARHLRTHTGEKPFQCRICMRNFSRKTALNRHLKTHTGSQKPFQCRICMRNFSRNESLKVHLRTHTGEKPFQCRICMRNFSVKNTLTRHLKTHTGSQKPFQCRICMRNFSRREHLVRHLRTHTGEKPFQCRICMRNFSLTHNLRRHLKTHLRGS

SEQ ID NO: 678 - protein, 909 aa, Synthetic construct
MGTMYNHDQEFDPPKVYPPVPAEKRKPIRVLSLFDGIATGLLVLKDLGIQVDRYIASEVCEDSITVGMVRHQGKIMYVGDVRSVTQKHIQEWGPFDLVIGGSPCNDLSIVNPARKGLYEGTGRLFFEFYRLLHDARPKEGDDRPFFWLFENVVAMGVSDKRDISRFLESNPVMIDAKEVSAAHRARYFWGNLPGMNRPLASTVNDKLELQECLEHGRIAKFSKVRTITTRSNSIKQGKDQHFPVFMNEKEDILWCTEMERVFGFPVHYTDVSNMSRLARQRLLGRSWSVPVIRHLFAPLKEYFACVSSGNSNANSRGPSFSSGLVPLSLRGSHMGPMEIYKTVSAWKRQPVRVLSLFRNIDKVLKSLGFLESGSGSGGGTLKYVEDVTNVVRRDVEKWGPFDLVYGSTQPLGSSCDRCPGWYMFQFHRILQYALPRQESQRPFFWIFMDNLLLTEDDQETTTRFLQTEAVTLQDVRGRDYQNAMRVWSNIPGLKSKHAPLTPKEEEYLQAQVRSRSKLDAPKVDLLVKNCLLPLREYFKYFSQNSLPLGGPSSGAPPPSGGSPAGSPTSTEEGTSESATPESGPGTSTEPSEGSAPGSPAGSPTSTEEGTSTEPSEGSAPGTSTEPSEPKKKRKVSRPGERPFQCRICMRNFSRTDTLARHLRTHTGEKPFQCRICMRNFSRKTALNRHLKTHTGSQKPFQCRICMRNFSRNESLKVHLRTHTGEKPFQCRICMRNFSVKNTLTRHLKTHTGSQKPFQCRICMRNFSRREHLVRHLRTHTGEKPFQCRICMRNFSLTHNLRRHLKTHLRGSPKKKRKVSGSETPGTSESATPESTGRTLVTFKDVFVDFTREEWKLLDTAQQIVYRNVMLENYKNLVSLGYQLTKPDVILRLEKGEEPSADYKDDDDKA

SEQ ID NO: 679 - protein, 923 aa, Synthetic construct
MGTMPKKKRKVPKKKRKVYNHDQEFDPPKVYPPVPAEKRKPIRVLSLFDGIATGLLVLKDLGIQVDRYIASEVCEDSITVGMVRHQGKIMYVGDVRSVTQKHIQEWGPFDLVIGGSPCNDLSIVNPARKGLYEGTGRLFFEFYRLLHDARPKEGDDRPFFWLFENVVAMGVSDKRDISRFLESNPVMIDAKEVSAAHRARYFWGNLPGMNRPLASTVNDKLELQECLEHGRIAKFSKVRTITTRSNSIKQGKDQHFPVFMNEKEDILWCTEMERVFGFPVHYTDVSNMSRLARQRLLGRSWSVPVIRHLFAPLKEYFACVSSGNSNANSRGPSFSSGLVPLSLRGSHMGPMEIYKTVSAWKRQPVRVLSLFRNIDKVLKSLGFLESGSGSGGGTLKYVEDVTNVVRRDVEKWGPFDLVYGSTQPLGSSCDRCPGWYMFQFHRILQYALPRQESQRPFFWIFMDNLLLTEDDQETTTRFLQTEAVTLQDVRGRDYQNAMRVWSNIPGLKSKHAPLTPKEEEYLQAQVRSRSKLDAPKVDLLVKNCLLPLREYFKYFSQNSLPLGGPSSGAPPPSGGSPAGSPTSTEEGTSESATPESGPGTSTEPSEGSAPGSPAGSPTSTEEGTSTEPSEGSAPGTSTEPSESRPGERPFQCRICMRNFSRTDTLARHLRTHTGEKPFQCRICMRNFSRKTALNRHLKTHTGSQKPFQCRICMRNFSRNESLKVHLRTHTGEKPFQCRICMRNFSVKNTLTRHLKTHTGSQKPFQCRICMRNFSRREHLVRHLRTHTGEKPFQCRICMRNFSLTHNLRRHLKTHLRGSSGSETPGTSESATPESTGRTLVTFKDVFVDFTREEWKLLDTAQQIVYRNVMLENYKNLVSLGYQLTKPDVILRLEKGEEPSADYKDDDDKAPKKKRKVPKKKRKV

SEQ ID NO: 680 - protein, 179 aa, Synthetic construct
SRPGERPFQCRICMRNFSDPSVLKRHLRTHTGEKPFQCRICMRNFSRTEHLARHLKTHTGGGGSQKPFQCRICMRNFSQSPHLKRHLRTHTGEKPFQCRICMRNFSDQTTLRRHLKTHTGSQKPFQCRICMRNFSKHSNLTRHTRTHTGEKPFQCRICMRNFSQMETLKRHLRTHLRGS

SEQ ID NO: 681 - protein, 912 aa, Synthetic construct
MGTMYNHDQEFDPPKVYPPVPAEKRKPIRVLSLFDGIATGLLVLKDLGIQVDRYIASEVCEDSITVGMVRHQGKIMYVGDVRSVTQKHIQEWGPFDLVIGGSPCNDLSIVNPARKGLYEGTGRLFFEFYRLLHDARPKEGDDRPFFWLFENVVAMGVSDKRDISRFLESNPVMIDAKEVSAAHRARYFWGNLPGMNRPLASTVNDKLELQECLEHGRIAKFSKVRTITTRSNSIKQGKDQHFPVFMNEKEDILWCTEMERVFGFPVHYTDVSNMSRLARQRLLGRSWSVPVIRHLFAPLKEYFACVSSGNSNANSRGPSFSSGLVPLSLRGSHMGPMEIYKTVSAWKRQPVRVLSLFRNIDKVLKSLGFLESGSGSGGGTLKYVEDVTNVVRRDVEKWGPFDLVYGSTQPLGSSCDRCPGWYMFQFHRILQYALPRQESQRPFFWIFMDNLLLTEDDQETTTRFLQTEAVTLQDVRGRDYQNAMRVWSNIPGLKSKHAPLTPKEEEYLQAQVRSRSKLDAPKVDLLVKNCLLPLREYFKYFSQNSLPLGGPSSGAPPPSGGSPAGSPTSTEEGTSESATPESGPGTSTEPSEGSAPGSPAGSPTSTEEGTSTEPSEGSAPGTSTEPSEPKKKRKVSRPGERPFQCRICMRNFSDPSVLKRHLRTHTGEKPFQCRICMRNFSRTEHLARHLKTHTGGGGSQKPFQCRICMRNFSQSPHLKRHLRTHTGEKPFQCRICMRNFSDQTTLRRHLKTHTGSQKPFQCRICMRNFSKHSNLTRHTRTHTGEKPFQCRICMRNFSQMETLKRHLRTHLRGSPKKKRKVSGSETPGTSESATPESTGRTLVTFKDVFVDFTREEWKLLDTAQQIVYRNVMLENYKNLVSLGYQLTKPDVILRLEKGEEPSADYKDDDDKA

SEQ ID NO: 682 - protein, 926 aa, Synthetic construct
MGTMPKKKRKVPKKKRKVYNHDQEFDPPKVYPPVPAEKRKPIRVLSLFDGIATGLLVLKDLGIQVDRYIASEVCEDSITVGMVRHQGKIMYVGDVRSVTQKHIQEWGPFDLVIGGSPCNDLSIVNPARKGLYEGTGRLFFEFYRLLHDARPKEGDDRPFFWLFENVVAMGVSDKRDISRFLESNPVMIDAKEVSAAHRARYFWGNLPGMNRPLASTVNDKLELQECLEHGRIAKFSKVRTITTRSNSIKQGKDQHFPVFMNEKEDILWCTEMERVFGFPVHYTDVSNMSRLARQRLLGRSWSVPVIRHLFAPLKEYFACVSSGNSNANSRGPSFSSGLVPLSLRGSHMGPMEIYKTVSAWKRQPVRVLSLFRNIDKVLKSLGFLESGSGSGGGTLKYVEDVTNVVRRDVEKWGPFDLVYGSTQPLGSSCDRCPGWYMFQFHRILQYALPRQESQRPFFWIFMDNLLLTEDDQETTTRFLQTEAVTLQDVRGRDYQNAMRVWSNIPGLKSKHAPLTPKEEEYLQAQVRSRSKLDAPKVDLLVKNCLLPLREYFKYFSQNSLPLGGPSSGAPPPSGGSPAGSPTSTEEGTSESATPESGPGTSTEPSEGSAPGSPAGSPTSTEEGTSTEPSEGSAPGTSTEPSESRPGERPFQCRICMRNFSDPSVLKRHLRTHTGEKPFQCRICMRNFSRTEHLARHLKTHTGGGGSQKPFQCRICMRNFSQSPHLKRHLRTHTGEKPFQCRICMRNFSDQTTLRRHLKTHTGSQKPFQCRICMRNFSKHSNLTRHTRTHTGEKPFQCRICMRNFSQMETLKRHLRTHLRGSSGSETPGTSESATPESTGRTLVTFKDVFVDFTREEWKLLDTAQQIVYRNVMLENYKNLVSLGYQLTKPDVILRLEKGEEPSADYKDDDDKAPKKKRKVPKKKRKV

SEQ ID NO: 683 - DNA, 18 bp, Synthetic construct
  source 1..18: mol_type = other DNA
ggtggggaggactgtgca

SEQ ID NO: 684 - protein, 176 aa, Synthetic construct
SRPGERPFQCRICMRNFSQSTTLKRHLRTHTGEKPFQCRICMRNFSGAHGLAGHLKTHTGSQKPFQCRICMRNFSDQTNLRRHLRTHTGEKPFQCRICMRNFSRQDNLQRHLKTHTGSQKPFQCRICMRNFSKGDHLRRHTRTHTGEKPFQCRICMRNFSEAHHLSRHLRTHLRGS

SEQ ID NO: 685 - protein, 909 aa, Synthetic construct
MGTMYNHDQEFDPPKVYPPVPAEKRKPIRVLSLFDGIATGLLVLKDLGIQVDRYIASEVCEDSITVGMVRHQGKIMYVGDVRSVTQKHIQEWGPFDLVIGGSPCNDLSIVNPARKGLYEGTGRLFFEFYRLLHDARPKEGDDRPFFWLFENVVAMGVSDKRDISRFLESNPVMIDAKEVSAAHRARYFWGNLPGMNRPLASTVNDKLELQECLEHGRIAKFSKVRTITTRSNSIKQGKDQHFPVFMNEKEDILWCTEMERVFGFPVHYTDVSNMSRLARQRLLGRSWSVPVIRHLFAPLKEYFACVSSGNSNANSRGPSFSSGLVPLSLRGSHMGPMEIYKTVSAWKRQPVRVLSLFRNIDKVLKSLGFLESGSGSGGGTLKYVEDVTNVVRRDVEKWGPFDLVYGSTQPLGSSCDRCPGWYMFQFHRILQYALPRQESQRPFFWIFMDNLLLTEDDQETTTRFLQTEAVTLQDVRGRDYQNAMRVWSNIPGLKSKHAPLTPKEEEYLQAQVRSRSKLDAPKVDLLVKNCLLPLREYFKYFSQNSLPLGGPSSGAPPPSGGSPAGSPTSTEEGTSESATPESGPGTSTEPSEGSAPGSPAGSPTSTEEGTSTEPSEGSAPGTSTEPSEPKKKRKVSRPGERPFQCRICMRNFSQSTTLKRHLRTHTGEKPFQCRICMRNFSGAHGLAGHLKTHTGSQKPFQCRICMRNFSDQTNLRRHLRTHTGEKPFQCRICMRNFSRQDNLQRHLKTHTGSQKPFQCRICMRNFSKGDHLRRHTRTHTGEKPFQCRICMRNFSEAHHLSRHLRTHLRGSPKKKRKVSGSETPGTSESATPESTGRTLVTFKDVFVDFTREEWKLLDTAQQIVYRNVMLENYKNLVSLGYQLTKPDVILRLEKGEEPSADYKDDDDKA

SEQ ID NO: 686 - protein, 923 aa, Synthetic construct
MGTMPKKKRKVPKKKRKVYNHDQEFDPPKVYPPVPAEKRKPIRVLSLFDGIATGLLVLKDLGIQVDRYIASEVCEDSITVGMVRHQGKIMYVGDVRSVTQKHIQEWGPFDLVIGGSPCNDLSIVNPARKGLYEGTGRLFFEFYRLLHDARPKEGDDRPFFWLFENVVAMGVSDKRDISRFLESNPVMIDAKEVSAAHRARYFWGNLPGMNRPLASTVNDKLELQECLEHGRIAKFSKVRTITTRSNSIKQGKDQHFPVFMNEKEDILWCTEMERVFGFPVHYTDVSNMSRLARQRLLGRSWSVPVIRHLFAPLKEYFACVSSGNSNANSRGPSFSSGLVPLSLRGSHMGPMEIYKTVSAWKRQPVRVLSLFRNIDKVLKSLGFLESGSGSGGGTLKYVEDVTNVVRRDVEKWGPFDLVYGSTQPLGSSCDRCPGWYMFQFHRILQYALPRQESQRPFFWIFMDNLLLTEDDQETTTRFLQTEAVTLQDVRGRDYQNAMRVWSNIPGLKSKHAPLTPKEEEYLQAQVRSRSKLDAPKVDLLVKNCLLPLREYFKYFSQNSLPLGGPSSGAPPPSGGSPAGSPTSTEEGTSESATPESGPGTSTEPSEGSAPGSPAGSPTSTEEGTSTEPSEGSAPGTSTEPSESRPGERPFQCRICMRNFSQSTTLKRHLRTHTGEKPFQCRICMRNFSGAHGLAGHLKTHTGSQKPFQCRICMRNFSDQTNLRRHLRTHTGEKPFQCRICMRNFSRQDNLQRHLKTHTGSQKPFQCRICMRNFSKGDHLRRHTRTHTGEKPFQCRICMRNFSEAHHLSRHLRTHLRGSSGSETPGTSESATPESTGRTLVTFKDVFVDFTREEWKLLDTAQQIVYRNVMLENYKNLVSLGYQLTKPDVILRLEKGEEPSADYKDDDDKAPKKKRKVPKKKRKV

SEQ ID NO: 687 - DNA, 19 bp, Synthetic construct
  source 1..19: mol_type = other DNA
gcaggaggacgaggacggc

SEQ ID NO: 688 - protein, 179 aa, Synthetic construct
SRPGERPFQCRICMRNFSTPSKLDRHTRTHTGEKPFQCRICMRNFSLAENLRRHLRTHTGSQKPFQCRICMRNFSRQDNLGRHLRTHTGEKPFQCRICMRNFSDGGNLGRHLKTHTGGGGSQKPFQCRICMRNFSQSPHLKRHLRTHTGEKPFQCRICMRNFSQSTSLQRHLKTHLRGS

SEQ ID NO: 689 - protein, 912 aa, Synthetic construct
MGTMYNHDQEFDPPKVYPPVPAEKRKPIRVLSLFDGIATGLLVLKDLGIQVDRYIASEVCEDSITVGMVRHQGKIMYVGDVRSVTQKHIQEWGPFDLVIGGSPCNDLSIVNPARKGLYEGTGRLFFEFYRLLHDARPKEGDDRPFFWLFENVVAMGVSDKRDISRFLESNPVMIDAKEVSAAHRARYFWGNLPGMNRPLASTVNDKLELQECLEHGRIAKFSKVRTITTRSNSIKQGKDQHFPVFMNEKEDILWCTEMERVFGFPVHYTDVSNMSRLARQRLLGRSWSVPVIRHLFAPLKEYFACVSSGNSNANSRGPSFSSGLVPLSLRGSHMGPMEIYKTVSAWKRQPVRVLSLFRNIDKVLKSLGFLESGSGSGGGTLKYVEDVTNVVRRDVEKWGPFDLVYGSTQPLGSSCDRCPGWYMFQFHRILQYALPRQESQRPFFWIFMDNLLLTEDDQETTTRFLQTEAVTLQDVRGRDYQNAMRVWSNIPGLKSKHAPLTPKEEEYLQAQVRSRSKLDAPKVDLLVKNCLLPLREYFKYFSQNSLPLGGPSSGAPPPSGGSPAGSPTSTEEGTSESATPESGPGTSTEPSEGSAPGSPAGSPTSTEEGTSTEPSEGSAPGTSTEPSEPKKKRKVSRPGERPFQCRICMRNFSTPSKLDRHTRTHTGEKPFQCRICMRNFSLAENLRRHLRTHTGSQKPFQCRICMRNFSRQDNLGRHLRTHTGEKPFQCRICMRNFSDGGNLGRHLKTHTGGGGSQKPFQCRICMRNFSQSPHLKRHLRTHTGEKPFQCRICMRNFSQSTSLQRHLKTHLRGSPKKKRKVSGSETPGTSESATPESTGRTLVTFKDVFVDFTREEWKLLDTAQQIVYRNVMLENYKNLVSLGYQLTKPDVILRLEKGEEPSADYKDDDDKA

SEQ ID NO: 690 - protein, 926 aa, Synthetic construct
MGTMPKKKRKVPKKKRKVYNHDQEFDPPKVYPPVPAEKRKPIRVLSLFDGIATGLLVLKDLGIQVDRYIASEVCEDSITVGMVRHQGKIMYVGDVRSVTQKHIQEWGPFDLVIGGSPCNDLSIVNPARKGLYEGTGRLFFEFYRLLHDARPKEGDDRPFFWLFENVVAMGVSDKRDISRFLESNPVMIDAKEVSAAHRARYFWGNLPGMNRPLASTVNDKLELQECLEHGRIAKFSKVRTITTRSNSIKQGKDQHFPVFMNEKEDILWCTEMERVFGFPVHYTDVSNMSRLARQRLLGRSWSVPVIRHLFAPLKEYFACVSSGNSNANSRGPSFSSGLVPLSLRGSHMGPMEIYKTVSAWKRQPVRVLSLFRNIDKVLKSLGFLESGSGSGGGTLKYVEDVTNVVRRDVEKWGPFDLVYGSTQPLGSSCDRCPGWYMFQFHRILQYALPRQESQRPFFWIFMDNLLLTEDDQETTTRFLQTEAVTLQDVRGRDYQNAMRVWSNIPGLKSKHAPLTPKEEEYLQAQVRSRSKLDAPKVDLLVKNCLLPLREYFKYFSQNSLPLGGPSSGAPPPSGGSPAGSPTSTEEGTSESATPESGPGTSTEPSEGSAPGSPAGSPTSTEEGTSTEPSEGSAPGTSTEPSESRPGERPFQCRICMRNFSTPSKLDRHTRTHTGEKPFQCRICMRNFSLAENLRRHLRTHTGSQKPFQCRICMRNFSRQDNLGRHLRTHTGEKPFQCRICMRNFSDGGNLGRHLKTHTGGGGSQKPFQCRICMRNFSQSPHLKRHLRTHTGEKPFQCRICMRNFSQSTSLQRHLKTHLRGSSGSETPGTSESATPESTGRTLVTFKDVFVDFTREEWKLLDTAQQIVYRNVMLENYKNLVSLGYQLTKPDVILRLEKGEEPSADYKDDDDKAPKKKRKVPKKKRKV

SEQ ID NO: 691 - DNA, 19 bp, Synthetic construct
  source 1..19: mol_type = other DNA
gcaggaggacgaggacggc

SEQ ID NO: 692 - protein, 179 aa, Synthetic construct
SRPGERPFQCRICMRNFSERAKLIRHLRTHTGEKPFQCRICMRNFSDPSNLRRHLKTHTGSQKPFQCRICMRNFSRQDNLGRHLRTHTGEKPFQCRICMRNFSDQGNLGRHLKTHTGGGGSQKPFQCRICMRNFSQSAHLKRHLRTHTGEKPFQCRICMRNFSQDVSLVRHLKTHLRGS

SEQ ID NO: 693 - protein, 912 aa, Synthetic construct
MGTMYNHDQEFDPPKVYPPVPAEKRKPIRVLSLFDGIATGLLVLKDLGIQVDRYIASEVCEDSITVGMVRHQGKIMYVGDVRSVTQKHIQEWGPFDLVIGGSPCNDLSIVNPARKGLYEGTGRLFFEFYRLLHDARPKEGDDRPFFWLFENVVAMGVSDKRDISRFLESNPVMIDAKEVSAAHRARYFWGNLPGMNRPLASTVNDKLELQECLEHGRIAKFSKVRTITTRSNSIKQGKDQHFPVFMNEKEDILWCTEMERVFGFPVHYTDVSNMSRLARQRLLGRSWSVPVIRHLFAPLKEYFACVSSGNSNANSRGPSFSSGLVPLSLRGSHMGPMEIYKTVSAWKRQPVRVLSLFRNIDKVLKSLGFLESGSGSGGGTLKYVEDVTNVVRRDVEKWGPFDLVYGSTQPLGSSCDRCPGWYMFQFHRILQYALPRQESQRPFFWIFMDNLLLTEDDQETTTRFLQTEAVTLQDVRGRDYQNAMRVWSNIPGLKSKHAPLTPKEEEYLQAQVRSRSKLDAPKVDLLVKNCLLPLREYFKYFSQNSLPLGGPSSGAPPPSGGSPAGSPTSTEEGTSESATPESGPGTSTEPSEGSAPGSPAGSPTSTEEGTSTEPSEGSAPGTSTEPSEPKKKRKVSRPGERPFQCRICMRNFSERAKLIRHLRTHTGEKPFQCRICMRNFSDPSNLRRHLKTHTGSQKPFQCRICMRNFSRQDNLGRHLRTHTGEKPFQCRICMRNFSDQGNLGRHLKTHTGGGGSQKPFQCRICMRNFSQSAHLKRHLRTHTGEKPFQCRICMRNFSQDVSLVRHLKTHLRGSPKKKRKVSGSETPGTSESATPESTGRTLVTFKDVFVDFTREEWKLLDTAQQIVYRNVMLENYKNLVSLGYQLTKPDVILRLEKGEEPSADYKDDDDKA

SEQ ID NO: 694 - protein, 926 aa, Synthetic construct
MGTMPKKKRKVPKKKRKVYNHDQEFDPPKVYPPVPAEKRKPIRVLSLFDGIATGLLVLKDLGIQVDRYIASEVCEDSITVGMVRHQGKIMYVGDVRSVTQKHIQEWGPFDLVIGGSPCNDLSIVNPARKGLYEGTGRLFFEFYRLLHDARPKEGDDRPFFWLFENVVAMGVSDKRDISRFLESNPVMIDAKEVSAAHRARYFWGNLPGMNRPLASTVNDKLELQECLEHGRIAKFSKVRTITTRSNSIKQGKDQHFPVFMNEKEDILWCTEMERVFGFPVHYTDVSNMSRLARQRLLGRSWSVPVIRHLFAPLKEYFACVSSGNSNANSRGPSFSSGLVPLSLRGSHMGPMEIYKTVSAWKRQPVRVLSLFRNIDKVLKSLGFLESGSGSGGGTLKYVEDVTNVVRRDVEKWGPFDLVYGSTQPLGSSCDRCPGWYMFQFHRILQYALPRQESQRPFFWIFMDNLLLTEDDQETTTRFLQTEAVTLQDVRGRDYQNAMRVWSNIPGLKSKHAPLTPKEEEYLQAQVRSRSKLDAPKVDLLVKNCLLPLREYFKYFSQNSLPLGGPSSGAPPPSGGSPAGSPTSTEEGTSESATPESGPGTSTEPSEGSAPGSPAGSPTSTEEGTSTEPSEGSAPGTSTEPSESRPGERPFQCRICMRNFSERAKLIRHLRTHTGEKPFQCRICMRNFSDPSNLRRHLKTHTGSQKPFQCRICMRNFSRQDNLGRHLRTHTGEKPFQCRICMRNFSDQGNLGRHLKTHTGGGGSQKPFQCRICMRNFSQSAHLKRHLRTHTGEKPFQCRICMRNFSQDVSLVRHLKTHLRGSSGSETPGTSESATPESTGRTLVTFKDVFVDFTREEWKLLDTAQQIVYRNVMLENYKNLVSLGYQLTKPDVILRLEKGEEPSADYKDDDDKAPKKKRKVPKKKRKV

SEQ ID NO: 695 - DNA, 6828 bp, Synthetic construct
  source 1..6828: mol_type = other DNA
atgtacccatacgatgttccagattacgcttcgccgaagaaaaagcgcaaggtcaatcacgatcaggagttcgacccccctaaggtgtacccaccagtgcctgcagagaagaggaagccaatccgggtgctgagcctgtttgatggcatcgccaccggcctgctggtgctgaaggatctgggcatccaggtggaccggtacatcgcctccgaggtgtgcgaggattctatcaccgtgggcatggtgcgccaccagggcaagatcatgtatgtgggcgacgtgcggtccgtgacacagaagcacatccaggagtggggcccattcgatctggtgatcggcggcagcccctgtaatgacctgtccatcgtgaaccctgcaaggaagggactgtacgagggaaccggccggctgttctttgagttttatagactgctgcacgacgccaggcctaaggagggcgacgatagaccattcttttggctgttcgagaatgtggtggctatgggcgtgagcgataagagggacatctccaggtttctggagtctaaccccgtgatgatcgatgcaaaggaggtgtccgccgcacacagagccaggtatttctggggcaatctgccaggaatgaacaggccactggcaagcaccgtgaatgacaagctggagctgcaggagtgcctggagcacggaaggatcgccaagttttccaaggtgcgcacaatcaccacacggagcaattccatcaagcagggcaaggatcagcacttccccgtgttcatgaacgagaaggaggacatcctgtggtgtaccgagatggagagagtgttcggctttccagtgcactacacagacgtgtctaacatgagcaggctggcaaggcagcggctgctgggcagatcttggagcgtgcccgtgatcaggcacctgttcgcccctctgaaggagtattttgcctgcgtgagcagcggcaactccaatgccaacagccggggcccctctttcagctccggattggtgcctctgagcctgaggggctcccacatggcagcaatccccgccctggaccccgaggccgagcctagcatggacgtgatcctggtgggctctagcgagctgtcctctagcgtgtctccaggaaccggaagggatctgatcgcatacgaggtgaaggccaatcagcggaacatcgaggacatctgtatctgctgtggcagcctgcaggtgcacacacagcacccactgttcgagggaggaatctgcgcaccctgtaaggataagttcctggacgccctgtttctgtacgacgatgacggctaccagtcctattgctctatctgctgttccggcgagaccctgctgatctgcggcaatccagattgtacaaggtgctattgttttgagtgcgtggactctctggtgggaccaggcaccagcggaaaggtgcacgccatgtccaactgggtgtgctacctgtgcctgccatcctctcgcagcggactgctgcagcggagaaggaagtggagatcccagctgaaggccttctatgatagggagtctgagaaccccctggagatgtttgagaccgtgccagtgtggcgccggcagcccgtgagggtgctgagcctgttcgaggatatcaagaaggagctgacatccctgggctttctggagtccggctctgaccccggacagctgaagcacgtggtggatgtgaccgacacagtgcggaaggatgtggaggagtggggccctttcgacctggtgtacggagcaacccctccactgggacacacatgcgacagacccccttcttggtacctgttccagtttcaccgcctgctgcagtatgcaaggccaaagccaggcagccctagaccattcttttggatgttcgtggataatctggtgctgaacaaggaggatctggacgtggccagcaggtttctggagatggagccagtgaccatcccagacgtgcacggcggctccctgcagaatgccgtgcgcgtgtggtctaacatccctgccatcagaagcaggcactgggcactggtgagcgaggaggagctgtccctgctggcccagaataagcagagcagcaagctggccgccaagtggcctacaaagctggtgaagaactgcttcctgccactgcgggagtacttcaagtatttttccaccgagctgacatctagcctgggaggaccctcctctggcgccccaccacctagcggcggctcccctgccggctctccaaccagcacagaggagggcaccagcgagtccgccacaccagagtctggacctggcaccagcacagagccatccgagggctctgccccaggctctcctgcaggcagccctacctccaccgaagagggcaccagcacagagccttctgagggcagcgccccaggcacctctacagagccaagcgagctcgaggacaagaagtacagcatcggcctggccatcggcaccaactctgtgggctgggccgtgatcaccgacgagtacaaggtgcccagcaagaaattcaaggtgctgggcaacaccgaccggcacagcatcaagaagaacctgatcggagccctgctgttcgacagcggcgaaacagccgaggccacccggctgaagagaaccgccagaagaagatacaccagacggaagaaccggatctgctatctgcaagagatcttcagcaacgagatggccaaggtggacgacagcttcttccacagactggaagagtccttcctggtggaagaggataagaagcacgagcggcaccccatcttcggcaacatcgtggacgaggtggcctaccacgagaagtaccccaccatctaccacctgagaaagaaactggtggacagcaccgacaaggccgacctgcggctgatctatctggccctggcccacatgatcaagttccggggccacttcctgatcgagggcgacctgaaccccgacaacagcgacgtggacaagctgttcatccagctggtgcagacctacaaccagctgttcgaggaaaaccccatcaacgccagcggcgtggacgccaaggccatcctgtctgccagactgagcaagagcagacggctggaaaatctgatcgcccagctgcccggcgagaagaagaatggcctgttcggcaacctgattgccctgagcctgggcctgacccccaacttcaagagcaacttcgacctggccgaggatgccaaactgcagctgagcaaggacacctacgacgacgacctggacaacctgctggcccagatcggcgaccagtacgccgacctgtttctggccgccaagaacctgtccgacgccatcctgctgagcgacatcctgagagtgaacaccgagatcaccaaggcccccctgagcgcctctatgatcaagagatacgacgagcaccaccaggacctgaccctgctgaaagctctcgtgcggcagcagctgcctgagaagtacaaagagattttcttcgaccagagcaagaacggctacgccggctacattgacggcggagccagccaggaagagttctacaagttcatcaagcccatcctggaaaagatggacggcaccgaggaactgctcgtgaagctgaacagagaggacctgctgcggaagcagcggaccttcgacaacggcagcatcccccaccagatccacctgggagagctgcacgccattctgcggcggcaggaagatttttacccattcctgaaggacaaccgggaaaagatcgagaagatcctgaccttccgcatcccctactacgtgggccctctggccaggggaaacagcagattcgcctggatgaccagaaagagcgaggaaaccatcaccccctggaacttcgaggaagtggtggacaagggcgcttccgcccagagcttcatcgagcggatgaccaacttcgataagaacctgcccaacgagaaggtgctgcccaagcacagcctgctgtacgagtacttcaccgtgtataacgagctgaccaaagtgaaatacgtgaccgagggaatgagaaagcccgccttcctgagcggcgagcagaaaaaggccatcgtggacctgctgttcaagaccaaccggaaagtgaccgtgaagcagctgaaagaggactacttcaagaaaatcgagtgcttcgactccgtggaaatctccggcgtggaagatcggttcaacgcctccctgggcacataccacgatctgctgaaaattatcaaggacaaggacttcctggacaatgaggaaaacgaggacattctggaagatatcgtgctgaccctgacactgtttgaggacagagagatgatcgaggaacggctgaaaacctatgcccacctgttcgacgacaaagtgatgaagcagctgaagcggcggagatacaccggctggggcaggctgagccggaagctgatcaacggcatccgggacaagcagtccggcaagacaatcctggatttcctgaagtccgacggcttcgccaacagaaacttcatgcagctgatccacgacgacagcctgacctttaaagaggacatccagaaagcccaggtgtccggccagggcgatagcctgcacgagcacattgccaatctggccggcagccccgccattaagaagggcatcctgcagacagtgaaggtggtggacgagctcgtgaaagtgatgggccggcacaagcccgagaacatcgtgatcgaaatggccagagagaaccagaccacccagaagggacagaagaacagccgcgagagaatgaagcggatcgaagagggcatcaaagagctgggcagccagatcctgaaagaacaccccgtggaaaacacccagctgcagaacgagaagctgtacctgtactacctgcagaatgggcgggatatgtacgtggaccaggaactggacatcaaccggctgtccgactacgatgtggacgccatcgtgcctcagagctttctgaaggacgactccatcgacaacaaggtgctgaccagaagcgacaagaaccggggcaagagcgacaacgtgccctccgaagaggtcgtgaagaagatgaagaactactggcggcagctgctgaacgccaagctgattacccagagaaagttcgacaatctgaccaaggccgagagaggcggcctgagcgaactggataaggccggcttcatcaagagacagctggtggaaacccggcagatcacaaagcacgtggcacagatcctggactcccggatgaacactaagtacgacgagaatgacaagctgatccgggaagtgaaagtgatcaccctgaagtccaagctggtgtccgatttccggaaggatttccagttttacaaagtgcgcgagatcaacaactaccaccacgcccacgacgcctacctgaacgccgtcgtgggaaccgccctgatcaaaaagtaccctaagctggaaagcgagttcgtgtacggcgactacaaggtgtacgacgtgcggaagatgatcgccaagagcgagcaggaaatcggcaaggctaccgccaagtacttcttctacagcaacatcatgaactttttcaagaccgagattaccctggccaacggcgagatccggaagcggcctctgatcgagacaaacggcgaaaccggggagatcgtgtgggataagggccgggattttgccaccgtgcggaaagtgctgagcatgccccaagtgaatatcgtgaaaaagaccgaggtgcagacaggcggcttcagcaaagagtctatcctgcccaagaggaacagcgataagctgatcgccagaaagaaggactgggaccctaagaagtacggcggcttcgacagccccaccgtggcctattctgtgctggtggtggccaaagtggaaaagggcaagtccaagaaactgaagagtgtgaaagagctgctggggatcaccatcatggaaagaagcagcttcgagaagaatcccatcgactttctggaagccaagggctacaaagaagtgaaaaaggacctgatcatcaagctgcctaagtactccctgttcgagctggaaaacggccggaagagaatgctggcctctgccggcgaactgcagaagggaaacgaactggccctgccctccaaatatgtgaacttcctgtacctggccagccactatgagaagctgaagggctcccccgaggataatgagcagaaacagctgtttgtggaacagcacaagcactacctggacgagatcatcgagcagatcagcgagttctccaagagagtgatcctggccgacgctaatctggacaaagtgctgtccgcctacaacaagcaccgggataagcccatcagagagcaggccgagaatatcatccacctgtttaccctgaccaatctgggagcccctgccgccttcaagtactttgacaccaccatcgaccggaagaggtacaccagcaccaaagaggtgctggacgccaccctgatccaccagagcatcaccggcctgtacgagacacggatcgacctgtctcagctgggaggcgacagccccaagaagaagagaaaggtgggagtcgacggatccagcggctccgagaccccaggcacatctgagagcgccacccctgagtcccggaccctggtgacattcaaggacgtgttcgtggacttcacccgggaggagtggaagctgctggacacagcccagcagatcgtgtacaggaacgtgatgctggagaactataagaatctggtgtctctgggctaccagctgacaaagccagatgtgatcctgcggctggagaagggagaggagccctggctggtgtag

SEQ ID NO: 696 - protein, 2090 aa, Synthetic construct
MGTMNHDQEFDPPKVYPPVPAEKRKPIRVLSLFDGIATGLLVLKDLGIQVDRYIASEVCEDSITVGMVRHQGKIMYVGDVRSVTQKHIQEWGPFDLVIGGSPCNDLSIVNPARKGLYEGTGRLFFEFYRLLHDARPKEGDDRPFFWLFENVVAMGVSDKRDISRFLESNPVMIDAKEVSAAHRARYFWGNLPGMNRPLASTVNDKLELQECLEHGRIAKFSKVRTITTRSNSIKQGKDQHFPVFMNEKEDILWCTEMERVFGFPVHYTDVSNMSRLARQRLLGRSWSVPVIRHLFAPLKEYFACVSSGNSNANSRGPSFSSGLVPLSLRGSHMGPMEIYKTVSAWKRQPVRVLSLFRNIDKVLKSLGFLESGSGSGGGTLKYVEDVTNVVRRDVEKWGPFDLVYGSTQPLGSSCDRCPGWYMFQFHRILQYALPRQESQRPFFWIFMDNLLLTEDDQETTTRFLQTEAVTLQDVRGRDYQNAMRVWSNIPGLKSKHAPLTPKEEEYLQAQVRSRSKLDAPKVDLLVKNCLLPLREYFKYFSQNSLPLGGPSSGAPPPSGGSPAGSPTSTEEGTSESATPESGPGTSTEPSEGSAPGSPAGSPTSTEEGTSTEPSEGSAPGTSTEPSEPKKKRKVYMDKKYSIGLAIGTNSVGWAVITDEYKVPSKKFKVLGNTDRHSIKKNLIGALLFDSGETAEATRLKRTARRRYTRRKNRICYLQEIFSNEMAKVDDSFFHRLEESFLVEEDKKHERHPIFGNIVDEVAYHEKYPTIYHLRKKLVDSTDKADLRLIYLALAHMIKFRGHFLIEGDLNPDNSDVDKLFIQLVQTYNQLFEENPINASGVDAKAILSARLSKSRRLENLIAQLPGEKKNGLFGNLIALSLGLTPNFKSNFDLAEDAKLQLSKDTYDDDLDNLLAQIGDQYADLFLAAKNLSDAILLSDILRVNTEITKAPLSASMIKRYDEHHQDLTLLKALVRQQLPEKYKEIFFDQSKNGYAGYIDGGASQEEFYKFIKPILEKMDGTEELLVKLNREDLLRKQRTFDNGSIPHQIHLGELHAILRRQEDFYPFLKDNREKIEKILTFRIPYYVGPLARGNSRFAWMTRKSEETITPWNFEEVVDKGASAQSFIERMTNFDKNLPNEKVLPKHSLLYEYFTVYNELTKVKYVTEGMRKPAFLSGEQKKAIVDLLFKTNRKVTVKQLKEDYFKKIECFDSVEISGVEDRFNASLGTYHDLLKIIKDKDFLDNEENEDILEDIVLTLTLFEDREMIEERLKTYAHLFDDKVMKQLKRRRYTGWGRLSRKLINGIRDKQSGKTILDFLKSDGFANRNFMQLIHDDSLTFKEDIQKAQVSGQGDSLHEHIANLAGSPAIKKGILQTVKVVDELVKVMGRHKPENIVIEMARENQTTQKGQKNSRERMKRIEEGIKELGSQILKEHPVENTQLQNEKLYLYYLQNGRDMYVDQELDINRLSDYDVDAIVPQSFLKDDSIDNKVLTRSDKNRGKSDNVPSEEVVKKMKNYWRQLLNAKLITQRKFDNLTKAERGGLSELDKAGFIKRQLVETRQITKHVAQILDSRMNTKYDENDKLIREVKVITLKSKLVSDFRKDFQFYKVREINNYHHAHDAYLNAVVGTALIKKYPKLESEFVYGDYKVYDVRKMIAKSEQEIGKATAKYFFYSNIMNFFKTEITLANGEIRKRPLIETNGETGEIVWDKGRDFATVRKVLSMPQVNIVKKTEVQTGGFSKESILPKRNSDKLIARKKDWDPKKYGGFDSPTVAYSVLVVAKVEKGKSKKLKSVKELLGITIMERSSFEKNPIDFLEAKGYKEVKKDLIIKLPKYSLFELENGRKRMLASAGELQKGNELALPSKYVNFLYLASHYEKLKGSPEDNEQKQLFVEQHKHYLDEIIEQISEFSKRVILADANLDKVLSAYNKHRDKPIREQAENIIHLFTLTNLGAPAAFKYFDTTIDRKRYTSTKEVLDATLIHQSITGLYETRIDLSQLGGDPKKKRKVSGSETPGTSESATPESTGRTLVTFKDVFVDFTREEWKLLDTAQQIVYRNVMLENYKNLVSLGYQLTKPDVILRLEKGEEP

SEQ ID NO: 697 - DNA, 6273 bp, Synthetic construct
  source 1..6273: mol_type = other DNA
atgggtaccatgaaccatgaccaggaatttgaccccccaaaggtttacccacctgtgccagctgagaagaggaagcccatccgcgtgctgtctctctttgatgggattgctacagggctcctggtgctgaaggacctgggcatccaagtggaccgctacattgcctccgaggtgtgtgaggactccatcacggtgggcatggtgcggcaccagggaaagatcatgtacgtcggggacgtccgcagcgtcacacagaagcatatccaggagtggggcccattcgacctggtgattggaggcagtccctgcaatgacctctccattgtcaaccctgcccgcaagggactttatgagggtactggccgcctcttctttgagttctaccgcctcctgcatgatgcgcggcccaaggagggagatgatcgccccttcttctggctctttgagaatgtggtggccatgggcgttagtgacaagagggacatctcgcgatttcttgagtctaaccccgtgatgattgacgccaaagaagtgtctgctgcacacagggcccgttacttctggggtaaccttcctggcatgaacaggcctttggcatccactgtgaatgataagctggagctgcaagagtgtctggagcacggcagaatagccaagttcagcaaagtgaggaccattaccaccaggtcaaactctataaagcagggcaaagaccagcatttccccgtcttcatgaacgagaaggaggacatcctgtggtgcactgaaatggaaagggtgtttggcttccccgtccactacacagacgtctccaacatgagccgcttggcgaggcagagactgctgggccgatcgtggagcgtgccggtcatccgccacctcttcgctccgctgaaggaatattttgcttgtgtgtctagcggcaatagtaacgctaacagccgcgggccgagcttcagcagcggcctggtgccgttaagcttgcgcggcagccatatgggccctatggagatatacaagacagtgtctgcatggaagagacagccagtgcgggtactgagcctcttcagaaacatcgacaaggtactaaagagtttgggcttcttggaaagcggttctggttctgggggaggaacgctgaagtacgtggaagatgtcacaaatgtcgtgaggagagacgtggagaaatggggcccctttgacctggtgtacggctcgacgcagcccctaggcagctcttgtgatcgctgtcccggctggtacatgttccagttccaccggatcctgcagtatgcgctgcctcgccaggagagtcagcggcccttcttctggatattcatggacaatctgctgctgactgaggatgaccaagagacaactacccgcttccttcagacagaggctgtgaccctccaggatgtccgtggcagagactaccagaatgctatgcgggtgtggagcaacattccagggctgaagagcaagcatgcgcccctgaccccaaaggaagaagagtatctgcaagcccaagtcagaagcaggagcaagctggacgccccgaaagttgacctcctggtgaagaactgccttctcccgctgagagagtacttcaagtatttttctcaaaactcacttcctcttggagggccgagctctggcgcacccccaccaagtggagggtctcctgccgggtccccaacatctactgaagaaggcaccagcgaatccgcaacgcccgagtcaggccctggtacctccacagaaccatctgaaggtagtgcgcctggttccccagctggaagccctacttccaccgaagaaggcacgtcaaccgaaccaagtgaaggatctgcccctgggaccagcactgaaccatctgagccaaaaaagaagagaaaggtatacatggacaagaagtacagcatcggcctggccatcggcaccaactctgtgggctgggccgtgatcaccgacgagtacaaggtgcccagcaagaaattcaaggtgctgggcaacaccgaccggcacagcatcaagaagaacctgatcggcgccctgctgttcgacagcggagaaacagccgaggccacccggctgaagagaaccgccagaagaagatacaccagacggaagaaccggatctgctatctgcaagagatcttcagcaacgagatggccaaggtggacgacagcttcttccacagactggaagagtccttcctggtggaagaggataagaagcacgagcggcaccccatcttcggcaacatcgtggacgaggtggcctaccacgagaagtaccccaccatctaccacctgagaaagaaactggtggacagcaccgacaaggccgacctgcggctgatctatctggccctggcccacatgatcaagttccggggccacttcctgatcgagggcgacctgaaccccgacaacagcgacgtggacaagctgttcatccagctggtgcagacctacaaccagctgttcgaggaaaaccccatcaacgccagcggcgtggacgccaaggccatcctgtctgccagactgagcaagagcagacggctggaaaatctgatcgcccagctgcccggcgagaagaagaatggcctgttcggcaacctgattgccctgagcctgggcctgacccccaacttcaagagcaacttcgacctggccgaggatgccaaactgcagctgagcaaggacacctacgacgacgacctggacaacctgctggcccagatcggcgaccagtacgccgacctgtttctggccgccaagaacctgtccgacgccatcctgctgagcgacatcctgagagtgaacaccgagatcaccaaggcccccctgagcgcctctatgatcaagagatacgacgagcaccaccaggacctgaccctgctgaaagctctcgtgcggcagcagctgcctgagaagtacaaagagattttcttcgaccagagcaagaacggctacgccggctacatcgatggcggagccagccaggaagagttctacaagttcatcaagcccatcctggaaaagatggacggcaccgaggaactgctcgtgaagctgaacagagaggacctgctgcggaagcagcggaccttcgacaacggcagcatcccccaccagatccacctgggagagctgcacgccattctgcggcggcaggaagatttttacccattcctgaaggacaaccgggaaaagatcgagaagatcctgaccttccgcatcccctactacgtgggccctctggccaggggaaacagcagattcgcctggatgaccagaaagagcgaggaaaccatcaccccctggaacttcgaggaagtggtggacaagggcgccagcgcccagagcttcatcgagcggatgaccaacttcgataagaacctgcccaacgagaaggtgctgcccaagcacagcctgctgtacgagtacttcaccgtgtacaacgagctgaccaaagtgaaatacgtgaccgagggaatgagaaagcccgccttcctgagcggcgagcagaaaaaagccatcgtggacctgctgttcaagaccaaccggaaagtgaccgtgaagcagctgaaagaggactacttcaagaaaatcgagtgcttcgactccgtggaaatctccggcgtggaagatcggttcaacgcctccctgggcacataccacgatctgctgaaaattatcaaggacaaggacttcctggacaatgaggaaaacgaggacattctggaagatatcgtgctgaccctgacactgtttgaggacagagagatgatcgaggaacggctgaaaacctatgcccacctgttcgacgacaaagtgatgaagcagctgaagcggcggagatacaccggctggggcaggctgagccggaagctgatcaacggcatccgggacaagcagtccggcaagacaatcctggatttcctgaagtccgacggcttcgccaacagaaacttcatgcagctgatccacgacgacagcctgacctttaaagaggacatccagaaagcccaggtgtccggccagggcgatagcctgcacgagcacattgccaatctggccggcagccccgccattaagaagggcatcctgcagacagtgaaggtggtggacgagctcgtgaaagtgatgggccggcacaagcccgagaacatcgtgatcgaaatggccagagagaaccagaccacccagaagggacagaagaacagccgcgagagaatgaagcggatcgaagagggcatcaaagagctgggcagccagatcctgaaagaacaccccgtggaaaacacccagctgcagaacgagaagctgtacctgtactacctgcagaatgggcgggatatgtacgtggaccaggaactggacatcaaccggctgtccgactacgatgtggacgctatcgtgcctcagagctttctgaaggacgactccatcgataacaaagtgctgactcggagcgacaagaaccggggcaagagcgacaacgtgccctccgaagaggtcgtgaagaagatgaagaactactggcgccagctgctgaatgccaagctgattacccagaggaagttcgacaatctgaccaaggccgagagaggcggcctgagcgaactggataaggccggcttcatcaagagacagctggtggaaacccggcagatcacaaagcacgtggcacagatcctggactcccggatgaacactaagtacgacgagaacgacaaactgatccgggaagtgaaagtgatcaccctgaagtccaagctggtgtccgatttccggaaggatttccagttttacaaagtgcgcgagatcaacaactaccaccacgcccacgacgcctacctgaacgccgtcgtgggaaccgccctgatcaaaaagtaccctaagctggaaagcgagttcgtgtacggcgactacaaggtgtacgacgtgcggaagatgatcgccaagagcgagcaggaaatcggcaaggctaccgccaagtacttcttctacagcaacatcatgaactttttcaagaccgagattaccctggccaacggcgagatccggaagcggcctctgatcgagacaaacggcgaaacaggcgagatcgtgtgggataagggccgggactttgccaccgtgcggaaagtgctgtctatgccccaagtgaatatcgtgaaaaagaccgaggtgcagacaggcggcttcagcaaagagtctatcctgcccaagaggaacagcgacaagctgatcgccagaaagaaggactgggaccctaagaagtacggcggcttcgacagccccaccgtggcctattctgtgctggtggtggccaaagtggaaaagggcaagtccaagaaactgaagagtgtgaaagagctgctggggatcaccatcatggaaagaagcagcttcgagaagaatcccatcgactttctggaagccaagggctacaaagaagtgaaaaaggacctgatcatcaagctgcctaagtactccctgttcgagctggaaaacggccggaagagaatgctggcctctgccggcgaactgcagaagggaaacgaactggccctgccctccaaatatgtgaacttcctgtacctggccagccactatgagaagctgaagggctcccccgaggataatgagcagaaacagctgtttgtggaacagcacaaacactacctggacgagatcatcgagcagatcagcgagttctccaagagagtgatcctggccgacgctaatctggacaaggtgctgagcgcctacaacaagcacagagacaagcctatcagagagcaggccgagaatatcatccacctgtttaccctgaccaatctgggagcccctgccgccttcaagtactttgacaccaccatcgaccggaagaggtacaccagcaccaaagaggtgctggacgccaccctgatccaccagagcatcaccggcctgtacgagacacggatcgacctgtctcagctgggaggcgacccaaaaaagaagagaaaggtaagcggaagtgagaccccaggtacatccgaatcagcaacgcctgaaagcaccggtcggacactggtgaccttcaaggatgtatttgtggacttcaccagggaggagtggaagctgctggacactgctcagcagatcgtgtacagaaatgtgatgctggagaactataagaacctggtttccttgggttatcagcttactaagccagatgtgatcctccggttggagaagggagaagagccctga

SEQ ID NO: 698 - protein, 2153 aa, Synthetic construct
MGTMPKKKRKVPKKKRKVYNHDQEFDPPKVYPPVPAEKRKPIRVLSLFDGIATGLLVLKDLGIQVDRYIASEVCEDSITVGMVRHQGKIMYVGDVRSVTQKHIQEWGPFDLVIGGSPCNDLSIVNPARKGLYEGTGRLFFEFYRLLHDARPKEGDDRPFFWLFENVVAMGVSDKRDISRFLESNPVMIDAKEVSAAHRARYFWGNLPGMNRPLASTVNDKLELQECLEHGRIAKFSKVRTITTRSNSIKQGKDQHFPVFMNEKEDILWCTEMERVFGFPVHYTDVSNMSRLARQRLLGRSWSVPVIRHLFAPLKEYFACVSSGNSNANSRGPSFSSGLVPLSLRGSHMGPMEIYKTVSAWKRQPVRVLSLFRNIDKVLKSLGFLESGSGSGGGTLKYVEDVTNVVRRDVEKWGPFDLVYGSTQPLGSSCDRCPGWYMFQFHRILQYALPRQESQRPFFWIFMDNLLLTEDDQETTTRFLQTEAVTLQDVRGRDYQNAMRVWSNIPGLKSKHAPLTPKEEEYLQAQVRSRSKLDAPKVDLLVKNCLLPLREYFKYFSQNSLPLGGPSSGAPPPSGGSPAGSPTSTEEGTSESATPESGPGTSTEPSEGSAPGSPAGSPTSTEEGTSTEPSEGSAPGTSTEPSEMDKKYSIGLAIGTNSVGWAVITDEYKVPSKKFKVLGNTDRHSIKKNLIGALLFDSGETAEATRLKRTARRRYTRRKNRICYLQEIFSNEMAKVDDSFFHRLEESFLVEEDKKHERHPIFGNIVDEVAYHEKYPTIYHLRKKLVDSTDKADLRLIYLALAHMIKFRGHFLIEGDLNPDNSDVDKLFIQLVQTYNQLFEENPINASGVDAKAILSARLSKSRRLENLIAQLPGEKKNGLFGNLIALSLGLTPNFKSNFDLAEDAKLQLSKDTYDDDLDNLLAQIGDQYADLFLAAKNLSDAILLSDILRVNTEITKAPLSASMIKRYDEHHQDLTLLKALVRQQLPEKYKEIFFDQSKNGYAGYIDGGASQEEFYKFIKPILEKMDGTEELLVKLNREDLLRKQRTFDNGSIPHQIHLGELHAILRRQEDFYPFLKDNREKIEKILTFRIPYYVGPLARGNSRFAWMTRKSEETITPWNFEEVVDKGASAQSFIERMTNFDKNLPNEKVLPKHSLLYEYFTVYNELTKVKYVTEGMRKPAFLSGEQKKAIVDLLFKTNRKVTVKQLKEDYFKKIECFDSVEISGVEDRFNASLGTYHDLLKIIKDKDFLDNEENEDILEDIVLTLTLFEDREMIEERLKTYAHLFDDKVMKQLKRRRYTGWGRLSRKLINGIRDKQSGKTILDFLKSDGFANRNFMQLIHDDSLTFKEDIQKAQVSGQGDSLHEHIANLAGSPAIKKGILQTVKVVDELVKVMGRHKPENIVIEMARENQTTQKGQKNSRERMKRIEEGIKELGSQILKEHPVENTQLQNEKLYLYYLQNGRDMYVDQELDINRLSDYDVDAIVPQSFLKDDSIDNKVLTRSDKNRGKSDNVPSEEVVKKMKNYWRQLLNAKLITQRKFDNLTKAERGGLSELDKAGFIKRQLVETRQITKHVAQILDSRMNTKYDENDKLIREVKVITLKSKLVSDFRKDFQFYKVREINNYHHAHDAYLNAVVGTALIKKYPKLESEFVYGDYKVYDVRKMIAKSEQEIGKATAKYFFYSNIMNFFKTEITLANGEIRKRPLIETNGETGEIVWDKGRDFATVRKVLSMPQVNIVKKTEVQTGGFSKESILPKRNSDKLIARKKDWDPKKYGGFDSPTVAYSVLVVAKVEKGKSKKLKSVKELLGITIMERSSFEKNPIDFLEAKGYKEVKKDLIIKLPKYSLFELENGRKRMLASAGELQKGNELALPSKYVNFLYLASHYEKLKGSPEDNEQKQLFVEQHKHYLDEIIEQISEFSKRVILADANLDKVLSAYNKHRDKPIREQAENIIHLFTLTNLGAPAAFKYFDTTIDRKRYTSTKEVLDATLIHQSITGLYETRIDLSQLGGDSGSETPGTSESATPESTGMNNSQGRVTFEDVTVNFTQGEWQRLNPEQRNLYRDVMLENYSNLVSVGQGETTKPDVILRLEQGKEPWLEEEEVLGSGRAEKNGDIGGQIWKPKDVKESLSADYKDDDDKAPKKKRKVPKKKRKV

SEQ ID NO: 699 - DNA, 6462 bp, Synthetic construct
  source 1..6462: mol_type = other DNA
atgggtaccatgccaaaaaagaagagaaaggtaccgaagaaaaaaagaaaggtatacaaccatgaccaggaattcgaccccccaaaggtttacccacctgtgccagctgagaagaggaagcccatccgcgtgctgtctctctttgatgggattgctacagggctcctggtgctgaaggacctgggcatccaagtggaccgctacattgcctccgaggtgtgtgaggactccatcacggtgggcatggtgcggcaccagggaaagatcatgtacgtcggggacgtccgcagcgtcacacagaagcatatccaggagtggggcccattcgacctggtgattggaggcagtccctgcaatgacctctccattgtcaaccctgcccgcaagggactttatgagggtactggccgcctcttctttgagttctaccgcctcctgcatgatgcgcggcccaaggagggagatgatcgccccttcttctggctctttgagaatgtggtggccatgggcgttagtgacaagagggacatctcgcgatttcttgagtctaaccccgtgatgattgacgccaaagaagtgtctgctgcacacagggcccgttacttctggggtaaccttcctggcatgaacaggcctttggcatccactgtgaatgataagctggagctgcaagagtgtctggagcacggcagaatagccaagttcagcaaagtgaggaccattaccaccaggtcaaactctataaagcagggcaaagaccagcatttccccgtcttcatgaacgagaaggaggacatcctgtggtgcactgaaatggaaagggtgtttggcttccccgtccactacacagacgtctccaacatgagccgcttggcgaggcagagactgctgggccgatcgtggagcgtgccggtcatccgccacctcttcgctccgctgaaggaatattttgcttgtgtgtctagcggcaatagtaacgctaacagccgcgggccgagcttcagcagcggcctggtgccgttaagcttgcgcggcagccatatgggccctatggagatatacaagacagtgtctgcatggaagagacagccagtgcgggtactgagcctcttcagaaacatcgacaaggtactaaagagtttgggcttcttggaaagcggttctggttctgggggaggaacgctgaagtacgtggaagatgtcacaaatgtcgtgaggagagacgtggagaaatggggcccctttgacctggtgtacggctcgacgcagcccctaggcagctcttgtgatcgctgtcccggctggtacatgttccagttccaccggatcctgcagtatgcgctgcctcgccaggagagtcagcggcccttcttctggatattcatggacaatctgctgctgactgaggatgaccaagagacaactacccgcttccttcagacagaggctgtgaccctccaggatgtccgtggcagagactaccagaatgctatgcgggtgtggagcaacattccagggctgaagagcaagcatgcgcccctgaccccaaaggaagaagagtatctgcaagcccaagtcagaagcaggagcaagctggacgccccgaaagttgacctcctggtgaagaactgccttctcccgctgagagagtacttcaagtatttttctcaaaactcacttcctcttggagggccgagctctggcgcacccccaccaagtggagggtctcctgccgggtccccaacatctactgaagaaggcaccagcgaatccgcaacgcccgagtcaggccctggtacctccacagaaccatctgaaggtagtgcgcctggttccccagctggaagccctacttccaccgaagaaggcacgtcaaccgaaccaagtgaaggatctgcccctgggaccagcactgaaccatctgagatggacaagaagtacagcatcggcctggccatcggcaccaactctgtgggctgggccgtgatcaccgacgagtacaaggtgcccagcaagaaattcaaggtgctgggcaacaccgaccggcacagcatcaagaagaacctgatcggcgccctgctgttcgacagcggagaaacagccgaggccacccggctgaagagaaccgccagaagaagatacaccagacggaagaaccggatctgctatctgcaagagatcttcagcaacgagatggccaaggtggacgacagcttcttccacagactggaagagtccttcctggtggaagaggataagaagcacgagcggcaccccatcttcggcaacatcgtggacgaggtggcctaccacgagaagtaccccaccatctaccacctgagaaagaaactggtggacagcaccgacaaggccgacctgcggctgatctatctggccctggcccacatgatcaagttccggggccacttcctgatcgagggcgacctgaaccccgacaacagcgacgtggacaagctgttcatccagctggtgcagacctacaaccagctgttcgaggaaaaccccatcaacgccagcggcgtggacgccaaggccatcctgtctgccagactgagcaagagcagacggctggaaaatctgatcgcccagctgcccggcgagaagaagaatggcctgttcggcaacctgattgccctgagcctgggcctgacccccaacttcaagagcaacttcgacctggccgaggatgccaaactgcagctgagcaaggacacctacgacgacgacctggacaacctgctggcccagatcggcgaccagtacgccgacctgtttctggccgccaagaacctgtccgacgccatcctgctgagcgacatcctgagagtgaacaccgagatcaccaaggcccccctgagcgcctctatgatcaagagatacgacgagcaccaccaggacctgaccctgctgaaagctctcgtgcggcagcagctgcctgagaagtacaaagagattttcttcgaccagagcaagaacggctacgccggctacatcgatggcggagccagccaggaagagttctacaagttcatcaagcccatcctggaaaagatggacggcaccgaggaactgctcgtgaagctgaacagagaggacctgctgcggaagcagcggaccttcgacaacggcagcatcccccaccagatccacctgggagagctgcacgccattctgcggcggcaggaagatttttacccattcctgaaggacaaccgggaaaagatcgagaagatcctgaccttccgcatcccctactacgtgggccctctggccaggggaaacagcagattcgcctggatgaccagaaagagcgaggaaaccatcaccccctggaacttcgaggaagtggtggacaagggcgccagcgcccagagcttcatcgagcggatgaccaacttcgataagaacctgcccaacgagaaggtgctgcccaagcacagcctgctgtacgagtacttcaccgtgtacaacgagctgaccaaagtgaaatacgtgaccgagggaatgagaaagcccgccttcctgagcggcgagcagaaaaaagccatcgtggacctgctgttcaagaccaaccggaaagtgaccgtgaagcagctgaaagaggactacttcaagaaaatcgagtgcttcgactccgtggaaatctccggcgtggaagatcggttcaacgcctccctgggcacataccacgatctgctgaaaattatcaaggacaaggacttcctggacaatgaggaaaacgaggacattctggaagatatcgtgctgaccctgacactgtttgaggacagagagatgatcgaggaacggctgaaaacctatgcccacctgttcgacgacaaagtgatgaagcagctgaagcggcggagatacaccggctggggcaggctgagccggaagctgatcaacggcatccgggacaagcagtccggcaagacaatcctggatttcctgaagtccgacggcttcgccaacagaaacttcatgcagctgatccacgacgacagcctgacctttaaagaggacatccagaaagcccaggtgtccggccagggcgatagcctgcacgagcacattgccaatctggccggcagccccgccattaagaagggcatcctgcagacagtgaaggtggtggacgagctcgtgaaagtgatgggccggcacaagcccgagaacatcgtgatcgaaatggccagagagaaccagaccacccagaagggacagaagaacagccgcgagagaatgaagcggatcgaagagggcatcaaagagctgggcagccagatcctgaaagaacaccccgtggaaaacacccagctgcagaacgagaagctgtacctgtactacctgcagaatgggcgggatatgtacgtggaccaggaactggacatcaaccggctgtccgactacgatgtggacgctatcgtgcctcagagctttctgaaggacgactccatcgataacaaagtgctgactcggagcgacaagaaccggggcaagagcgacaacgtgccctccgaagaggtcgtgaagaagatgaagaactactggcgccagctgctgaatgccaagctgattacccagaggaagttcgacaatctgaccaaggccgagagaggcggcctgagcgaactggataaggccggcttcatcaagagacagctggtggaaacccggcagatcacaaagcacgtggcacagatcctggactcccggatgaacactaagtacgacgagaacgacaaactgatccgggaagtgaaagtgatcaccctgaagtccaagctggtgtccgatttccggaaggatttccagttttacaaagtgcgcgagatcaacaactaccaccacgcccacgacgcctacctgaacgccgtcgtgggaaccgccctgatcaaaaagtaccctaagctggaaagcgagttcgtgtacggcgactacaaggtgtacgacgtgcggaagatgatcgccaagagcgagcaggaaatcggcaaggctaccgccaagtacttcttctacagcaacatcatgaactttttcaagaccgagattaccctggccaacggcgagatccggaagcggcctctgatcgagacaaacggcgaaacaggcgagatcgtgtgggataagggccgggactttgccaccgtgcggaaagtgctgtctatgccccaagtgaatatcgtgaaaaagaccgaggtgcagacaggcggcttcagcaaagagtctatcctgcccaagaggaacagcgacaagctgatcgccagaaagaaggactgggaccctaagaagtacggcggcttcgacagccccaccgtggcctattctgtgctggtggtggccaaagtggaaaagggcaagtccaagaaactgaagagtgtgaaagagctgctggggatcaccatcatggaaagaagcagcttcgagaagaatcccatcgactttctggaagccaagggctacaaagaagtgaaaaaggacctgatcatcaagctgcctaagtactccctgttcgagctggaaaacggccggaagagaatgctggcctctgccggcgaactgcagaagggaaacgaactggccctgccctccaaatatgtgaacttcctgtacctggccagccactatgagaagctgaagggctcccccgaggataatgagcagaaacagctgtttgtggaacagcacaaacactacctggacgagatcatcgagcagatcagcgagttctccaagagagtgatcctggccgacgctaatctggacaaggtgctgagcgcctacaacaagcacagagacaagcctatcagagagcaggccgagaatatcatccacctgtttaccctgaccaatctgggagcccctgccgccttcaagtactttgacaccaccatcgaccggaagaggtacaccagcaccaaagaggtgctggacgccaccctgatccaccagagcatcaccggcctgtacgagacacggatcgacctgtctcagctgggaggcgacagcggaagtgagaccccaggtacatccgaatcagcaacgcctgaaagcaccggtatgaacaattcacaggggagagtgacattcgaagacgtgaccgtgaacttcacccagggagaatggcagcgcttgaacccagaacaaaggaacctctatcgggacgtgatgctggaaaactactcaaatttggtgagcgttgggcagggtgagaccactaagcctgacgtgatcctgagattggaacagggcaaggagccttggctcgaggaagaggaagtcctgggctcagggagggccgagaaaaacggtgatataggaggccagatatggaagcctaaggacgtcaaggagagcctgagcgctgattacaaagatgatgacgataaagccccaaaaaagaagagaaaggtaccgaagaaaaaaagaaaggtctga

SEQ ID NO: 700 - DNA, 18 bp, Synthetic construct
  source 1..18: mol_type = other DNA
ccggcagaacttggagtc

SEQ ID NO: 701 - DNA, 18 bp, Synthetic construct
  source 1..18: mol_type = other DNA
ggtggggaggactgtgca

SEQ ID NO: 702 - DNA, 18 bp, Synthetic construct
  source 1..18: mol_type = other DNA
ggtggggaggactgtgca

SEQ ID NO: 703 - DNA, 18 bp, Synthetic construct
  source 1..18: mol_type = other DNA
gatggggctctggtggcg

SEQ ID NO: 704 - DNA, 18 bp, Synthetic construct
  source 1..18: mol_type = other DNA
gatggggctctggtggcg

SEQ ID NO: 705 - DNA, 18 bp, Synthetic construct
  source 1..18: mol_type = other DNA
gatggggctctggtggcg

SEQ ID NO: 706 - DNA, 18 bp, Synthetic construct
  source 1..18: mol_type = other DNA
gcaggaggatgaaaaggg

SEQ ID NO: 707 - DNA, 18 bp, Synthetic construct
  source 1..18: mol_type = other DNA
ggagccgctgctgcaacg

SEQ ID NO: 708 - DNA, 18 bp, Synthetic construct
  source 1..18: mol_type = other DNA
gactgtgcaggagctgaa

SEQ ID NO: 709 - DNA, 18 bp, Synthetic construct
  source 1..18: mol_type = other DNA
ggggaggactgtgcagga

SEQ ID NO: 710 - DNA, 18 bp, Synthetic construct
  source 1..18: mol_type = other DNA
ggtggggaggactgtgca

SEQ ID NO: 711 - DNA, 18 bp, Synthetic construct
  source 1..18: mol_type = other DNA
ggtggggaggactgtgca

SEQ ID NO: 712 - DNA, 18 bp, Synthetic construct
  source 1..18: mol_type = other DNA
tgcggtggggaggactgt

SEQ ID NO: 713 - DNA, 18 bp, Synthetic construct
  source 1..18: mol_type = other DNA
gtggaaggtggctgtggt

SEQ ID NO: 714 - DNA, 18 bp, Synthetic construct
  source 1..18: mol_type = other DNA
gcggtggaaggtggctgt

SEQ ID NO: 715 - DNA, 18 bp, Synthetic construct
  source 1..18: mol_type = other DNA
gcggtggaaggtggctgt

SEQ ID NO: 716 - DNA, 18 bp, Synthetic construct
  source 1..18: mol_type = other DNA
gcggcgggggaggacggg

SEQ ID NO: 717 - DNA, 18 bp, Synthetic construct
  source 1..18: mol_type = other DNA
gcggcgggggaggacggg

SEQ ID NO: 718 - DNA, 18 bp, Synthetic construct
  source 1..18: mol_type = other DNA
tagggatgggaggccggg

SEQ ID NO: 719 - DNA, 18 bp, Synthetic construct
  source 1..18: mol_type = other DNA
ggcgccgccggcgtggac

SEQ ID NO: 720 - DNA, 18 bp, Synthetic construct
  source 1..18: mol_type = other DNA
ggcgccgccggcgtggac

SEQ ID NO: 721 - DNA, 18 bp, Synthetic construct
  source 1..18: mol_type = other DNA
gtcgttgcagcagcggct

SEQ ID NO: 722 - DNA, 18 bp, Synthetic construct
  source 1..18: mol_type = other DNA
gatggggctctggtggcg

SEQ ID NO: 723 - DNA, 18 bp, Synthetic construct
  source 1..18: mol_type = other DNA
tcggtgggcagcgaggag

SEQ ID NO: 724 - DNA, 18 bp, Synthetic construct
  source 1..18: mol_type = other DNA
ggggaggactgtgcagga

SEQ ID NO: 725 - DNA, 18 bp, Synthetic construct
  source 1..18: mol_type = other DNA
ggggaggactgtgcagga

SEQ ID NO: 726 - DNA, 18 bp, Synthetic construct
  source 1..18: mol_type = other DNA
gcggcgggggaggacggg

SEQ ID NO: 727 - DNA, 19 bp, Synthetic construct
  source 1..19: mol_type = other DNA
gaggagtgagccaggcagt

SEQ ID NO: 728 - DNA, 19 bp, Synthetic construct
  source 1..19: mol_type = other DNA
ggtgtgggtgcttgacgcc

SEQ ID NO: 729 - DNA, 19 bp, Synthetic construct
  source 1..19: mol_type = other DNA
tctgagcctggaggagtga

SEQ ID NO: 730 - DNA, 19 bp, Synthetic construct
  source 1..19: mol_type = other DNA
gaggagtgagccaggcagt

SEQ ID NO: 731 - DNA, 19 bp, Synthetic construct
  source 1..19: mol_type = other DNA
gagggccaggggagaggtt

SEQ ID NO: 732 - DNA, 19 bp, Synthetic construct
  source 1..19: mol_type = other DNA
gcaggaggacgaggacggc

SEQ ID NO: 733 - DNA, 19 bp, Synthetic construct
  source 1..19: mol_type = other DNA
gcaggaggacgaggacggc

SEQ ID NO: 734 - DNA, 19 bp, Synthetic construct
  source 1..19: mol_type = other DNA
gcaggaggacgaggacggc

SEQ ID NO: 735 - DNA, 19 bp, Synthetic construct
  source 1..19: mol_type = other DNA
tggggaggactgtgcagga

SEQ ID NO: 736 - DNA, 19 bp, Synthetic construct
  source 1..19: mol_type = other DNA
gttgcaggcgggcgccgcc

SEQ ID NO: 737 - DNA, 19 bp, Synthetic construct
  source 1..19: mol_type = other DNA
gttgcaggcgggcgccgcc

SEQ ID NO: 738 - DNA, 19 bp, Synthetic construct
  source 1..19: mol_type = other DNA
gctgtttggggagggcgag

SEQ ID NO: 739 - DNA, 19 bp, Synthetic construct
  source 1..19: mol_type = other DNA
gctgtttggggagggcgag

SEQ ID NO: 740 - DNA, 19 bp, Synthetic construct
  source 1..19: mol_type = other DNA
gcagaggccggagggggtc

SEQ ID NO: 741 - DNA, 19 bp, Synthetic construct
  source 1..19: mol_type = other DNA
tggggagggcgaggccgaa

SEQ ID NO: 742 - DNA, 19 bp, Synthetic construct
  source 1..19: mol_type = other DNA
gcgggtgtagggatgggag

SEQ ID NO: 743 - DNA, 19 bp, Synthetic construct
  source 1..19: mol_type = other DNA
gcgggtgtagggatgggag

SEQ ID NO: 744 - DNA, 19 bp, Synthetic construct
  source 1..19: mol_type = other DNA
ggagctgggagccgctgct

SEQ ID NO: 745 - DNA, 19 bp, Synthetic construct
  source 1..19: mol_type = other DNA
gcaaggcggcgggggagga

SEQ ID NO: 746 - DNA, 20 bp, Synthetic construct
  source 1..20: mol_type = other DNA
gctgtttggggagggcgagg

SEQ ID NO: 747 - DNA, 20 bp, Synthetic construct
  source 1..20: mol_type = other DNA
gctgtttggggagggcgagg

SEQ ID NO: 748 - protein, 7 aa, Synthetic construct
DHSSLKR

SEQ ID NO: 749 - protein, 7 aa, Synthetic construct
QSPHLQR

SEQ ID NO: 750 - protein, 7 aa, Synthetic construct
YKHVLVN

SEQ ID NO: 751 - protein, 7 aa, Synthetic construct
QMSNLDR

SEQ ID NO: 752 - protein, 7 aa, Synthetic construct
QAETLKR

SEQ ID NO: 753 - protein, 7 aa, Synthetic construct
RNYDLGI

SEQ ID NO: 754 - protein, 7 aa, Synthetic construct
QSTTLKR

SEQ ID NO: 755 - protein, 7 aa, Synthetic construct
QAHGLTA

SEQ ID NO: 756 - protein, 7 aa, Synthetic construct
DAANLRR

SEQ ID NO: 757 - protein, 7 aa, Synthetic construct
RRDNLLR

SEQ ID NO: 758 - protein, 7 aa, Synthetic construct
RNTHLAR

SEQ ID NO: 759 - protein, 7 aa, Synthetic construct
EAHHLSR

SEQ ID NO: 760 - protein, 7 aa, Synthetic construct
QSTTLKR

SEQ ID NO: 761 - protein, 7 aa, Synthetic construct
GAHGLAG

SEQ ID NO: 762 - protein, 7 aa, Synthetic construct
DQTNLRR

SEQ ID NO: 763 - protein, 7 aa, Synthetic construct
RQDNLQR

SEQ ID NO: 764 - protein, 7 aa, Synthetic construct
KGDHLRR

SEQ ID NO: 765 - protein, 7 aa, Synthetic construct
EAHHLSR

SEQ ID NO: 766 - protein, 7 aa, Synthetic construct
RTDTLAR

SEQ ID NO: 767 - protein, 7 aa, Synthetic construct
RKTALNR

SEQ ID NO: 768 - protein, 7 aa, Synthetic construct
RNESLKV

SEQ ID NO: 769 - protein, 7 aa, Synthetic construct
VKNTLTR

SEQ ID NO: 770 - protein, 7 aa, Synthetic construct
RREHLVR

SEQ ID NO: 771 - protein, 7 aa, Synthetic construct
ISHNLAR

SEQ ID NO: 772 - protein, 7 aa, Synthetic construct
RRLTLDR

SEQ ID NO: 773 - protein, 7 aa, Synthetic construct
RRDLLHN

SEQ ID NO: 774 - protein, 7 aa, Synthetic construct
RNESLKV

SEQ ID NO: 775 - protein, 7 aa, Synthetic construct
VGASLKR

SEQ ID NO: 776 - protein, 7 aa, Synthetic construct
RREHLVR

SEQ ID NO: 777 - protein, 7 aa, Synthetic construct
LEHNLGR

SEQ ID NO: 778 - protein, 7 aa, Synthetic construct
RNHTLQR

SEQ ID NO: 779 - protein, 7 aa, Synthetic construct
RREVLEN

SEQ ID NO: 780 - protein, 7 aa, Synthetic construct
RHESLIV

SEQ ID NO: 781 - protein, 7 aa, Synthetic construct
VGASLKR

SEQ ID NO: 782 - protein, 7 aa, Synthetic construct
KKDHLHR

SEQ ID NO: 783 - protein, 7 aa, Synthetic construct
LMHNLTR

SEQ ID NO: 784 - protein, 7 aa, Synthetic construct
KRERLER

SEQ ID NO: 785 - protein, 7 aa, Synthetic construct
QKGNLVV

SEQ ID NO: 786 - protein, 7 aa, Synthetic construct
QKTHLAV

SEQ ID NO: 787 - protein, 7 aa, Synthetic construct
QGGHLKR

SEQ ID NO: 788 - protein, 7 aa, Synthetic construct
QRPHLTN

SEQ ID NO: 789 - protein, 7 aa, Synthetic construct
QAATLQR

SEQ ID NO: 790 - protein, 7 aa, Synthetic construct
RSQTLAQ

SEQ ID NO: 791 - protein, 7 aa, Synthetic construct
QSTTLKR

SEQ ID NO: 792 - protein, 7 aa, Synthetic construct
LRDSLKR

SEQ ID NO: 793 - protein, 7 aa, Synthetic construct
LGHTLNR

SEQ ID NO: 794 - protein, 7 aa, Synthetic construct
DPSVLTR

SEQ ID NO: 795 - protein, 7 aa, Synthetic construct
QNSHLRR

SEQ ID NO: 796 - protein, 7 aa, Synthetic construct
QRGNLAR

SEQ ID NO: 797 - protein, 7 aa, Synthetic construct
VSNTLTR

SEQ ID NO: 798 - protein, 7 aa, Synthetic construct
QRPHLTN

SEQ ID NO: 799 - protein, 7 aa, Synthetic construct
QAATLQR

SEQ ID NO: 800 - protein, 7 aa, Synthetic construct
RRQHLEL

SEQ ID NO: 801 - protein, 7 aa, Synthetic construct
DRGNLTR

SEQ ID NO: 802 - protein, 7 aa, Synthetic construct
QSAHLKR

SEQ ID NO: 803 - protein, 7 aa, Synthetic construct
QDVSLVR

SEQ ID NO: 804 - protein, 7 aa, Synthetic construct
RKQHLQL

SEQ ID NO: 805 - protein, 7 aa, Synthetic construct
DRGNLTR

SEQ ID NO: 806 - protein, 7 aa, Synthetic construct
RDDNLQR

SEQ ID NO: 807 - protein, 7 aa, Synthetic construct
RMEHLPR

SEQ ID NO: 808 - protein, 7 aa, Synthetic construct
QSTTLKR

SEQ ID NO: 809 - protein, 7 aa, Synthetic construct
QPHGLGA

SEQ ID NO: 810 - protein, 7 aa, Synthetic construct
LVENLRR

SEQ ID NO: 811 - protein, 7 aa, Synthetic construct
RVENLHR

SEQ ID NO: 812 - protein, 7 aa, Synthetic construct
RREHLVR

SEQ ID NO: 813 - protein, 7 aa, Synthetic construct
LSQGLAR

SEQ ID NO: 814 - protein, 7 aa, Synthetic construct
QSTTLKR

SEQ ID NO: 815 - protein, 7 aa, Synthetic construct
QAHGLTA

SEQ ID NO: 816 - protein, 7 aa, Synthetic construct
DGSNLAR

SEQ ID NO: 817 - protein, 7 aa, Synthetic construct
RRDNLLR

SEQ ID NO: 818 - protein, 7 aa, Synthetic construct
RREHLVR

SEQ ID NO: 819 - protein, 7 aa, Synthetic construct
VDHHLRR

SEQ ID NO: 820 - protein, 7 aa, Synthetic construct
RKQHLQL

SEQ ID NO: 821 - protein, 7 aa, Synthetic construct
DRGNLTR

SEQ ID NO: 822 - protein, 7 aa, Synthetic construct
RPDNLVR

SEQ ID NO: 823 - protein, 7 aa, Synthetic construct
RIDKLGG

SEQ ID NO: 824 - protein, 7 aa, Synthetic construct
EAHHLSR

SEQ ID NO: 825 - protein, 7 aa, Synthetic construct
QGRSLRA

SEQ ID NO: 826 - protein, 7 aa, Synthetic construct
EAHHLSR

SEQ ID NO: 827 - protein, 7 aa, Synthetic construct
QPHGLRA

SEQ ID NO: 828 - protein, 7 aa, Synthetic construct
LKEHLTR

SEQ ID NO: 829 - protein, 7 aa, Synthetic construct
MGHHLKR

SEQ ID NO: 830 - protein, 7 aa, Synthetic construct
QRGNLLR

SEQ ID NO: 831 - protein, 7 aa, Synthetic construct
RPDALPR

SEQ ID NO: 832 - protein, 7 aa, Synthetic construct
RRQHLQY

SEQ ID NO: 833 - protein, 7 aa, Synthetic construct
LKEHLTR

SEQ ID NO: 834 - protein, 7 aa, Synthetic construct
SKQKLQV

SEQ ID NO: 835 - protein, 7 aa, Synthetic construct
QQTNLTR

SEQ ID NO: 836 - protein, 7 aa, Synthetic construct
RREVLEN

SEQ ID NO: 837 - protein, 7 aa, Synthetic construct
RPDGLAR

SEQ ID NO: 838 - protein, 7 aa, Synthetic construct
RRQHLTL

SEQ ID NO: 839 - protein, 7 aa, Synthetic construct
DNSHLQR

SEQ ID NO: 840 - protein, 7 aa, Synthetic construct
LPHHLQR

SEQ ID NO: 841 - protein, 7 aa, Synthetic construct
QSNNLTR

SEQ ID NO: 842 - protein, 7 aa, Synthetic construct
RNFILQR

SEQ ID NO: 843 - protein, 7 aa, Synthetic construct
RKDDLKR

SEQ ID NO: 844 - protein, 7 aa, Synthetic construct
RQEHLVR

SEQ ID NO: 845 - protein, 7 aa, Synthetic construct
EGGNLMR

SEQ ID NO: 846 - protein, 7 aa, Synthetic construct
RPDNLVR

SEQ ID NO: 847 - protein, 7 aa, Synthetic construct
RIDKLGG

SEQ ID NO: 848 - protein, 7 aa, Synthetic construct
RRDDLTR

SEQ ID NO: 849 - protein, 7 aa, Synthetic construct
RKDLLHR

SEQ ID NO: 850 - protein, 7 aa, Synthetic construct
RREHLVR

SEQ ID NO: 851 - protein, 7 aa, Synthetic construct
DMGNLGR

SEQ ID NO: 852 - protein, 7 aa, Synthetic construct
RDDNLQR

SEQ ID NO: 853 - protein, 7 aa, Synthetic construct
RMEHLPR

SEQ ID NO: 854 - protein, 7 aa, Synthetic construct
RKEDLAR

SEQ ID NO: 855 - protein, 7 aa, Synthetic construct
RLDMLAR

SEQ ID NO: 856 - protein, 7 aa, Synthetic construct
RREHLVR

SEQ ID NO: 857 - protein, 7 aa, Synthetic construct
EHRGLKR

SEQ ID NO: 858 - protein, 7 aa, Synthetic construct
RGDNLGR

SEQ ID NO: 859 - protein, 7 aa, Synthetic construct
RSDHLSL

SEQ ID NO: 860 - protein, 7 aa, Synthetic construct
QQAHLVR

SEQ ID NO: 861 - protein, 7 aa, Synthetic construct
RDDNLRT

SEQ ID NO: 862 - protein, 7 aa, Synthetic construct
DDANLRR

SEQ ID NO: 863 - protein, 7 aa, Synthetic construct
RREVLEN

SEQ ID NO: 864 - protein, 7 aa, Synthetic construct
LKEHLTR

SEQ ID NO: 865 - protein, 7 aa, Synthetic construct
DPSNLRR

SEQ ID NO: 866 - protein, 7 aa, Synthetic construct
DSSVLRR

SEQ ID NO: 867 - protein, 7 aa, Synthetic construct
ENSKLNR

SEQ ID NO: 868 - protein, 7 aa, Synthetic construct
DRANLRR

SEQ ID NO: 869 - protein, 7 aa, Synthetic construct
RPDALSR

SEQ ID NO: 870 - protein, 7 aa, Synthetic construct
LKEHLTR

SEQ ID NO: 871 - protein, 7 aa, Synthetic construct
DPSNLRR

SEQ ID NO: 872 - protein, 7 aa, Synthetic construct
DSSVLRR

SEQ ID NO: 873 - protein, 7 aa, Synthetic construct
ENSKLNR

SEQ ID NO: 874 - protein, 7 aa, Synthetic construct
LSQTLKR

SEQ ID NO: 875 - protein, 7 aa, Synthetic construct
RTDTLAR

SEQ ID NO: 876 - protein, 7 aa, Synthetic construct
QMETLKR

SEQ ID NO: 877 - protein, 7 aa, Synthetic construct
QGGTLRR

SEQ ID NO: 878 - protein, 7 aa, Synthetic construct
HKSSLTR

SEQ ID NO: 879 - protein, 7 aa, Synthetic construct
DRTPLQR

SEQ ID NO: 880 - protein, 7 aa, Synthetic construct
RTDTLAR

SEQ ID NO: 881 - protein, 7 aa, Synthetic construct
RKTALNR

SEQ ID NO: 882 - protein, 7 aa, Synthetic construct
RNESLKV

SEQ ID NO: 883 - protein, 7 aa, Synthetic construct
VKNTLTR

SEQ ID NO: 884 - protein, 7 aa, Synthetic construct
RREHLVR

SEQ ID NO: 885 - protein, 7 aa, Synthetic construct
LTHNLRR

SEQ ID NO: 886 - protein, 7 aa, Synthetic construct
RLDNLDR

SEQ ID NO: 887 - protein, 7 aa, Synthetic construct
RADNLRR

SEQ ID NO: 888 - protein, 7 aa, Synthetic construct
SHWKLHT

SEQ ID NO: 889 - protein, 7 aa, Synthetic construct
EKGHLNR

SEQ ID NO: 890 - protein, 7 aa, Synthetic construct
RREVLEN

SEQ ID NO: 891 - protein, 7 aa, Synthetic construct
RADGLQL

SEQ ID NO: 892 - protein, 7 aa, Synthetic construct
QSPHLKR

SEQ ID NO: 893 - protein, 7 aa, Synthetic construct
QSTSLQR

SEQ ID NO: 894 - protein, 7 aa, Synthetic construct
RKQHLTL

SEQ ID NO: 895 - protein, 7 aa, Synthetic construct
DRGNLTR

SEQ ID NO: 896 - protein, 7 aa, Synthetic construct
RPHNLLR

SEQ ID NO: 897 - protein, 7 aa, Synthetic construct
RREHLVR

SEQ ID NO: 898 - protein, 7 aa, Synthetic construct
QQAHLVR

SEQ ID NO: 899 - protein, 7 aa, Synthetic construct
QAETLKR

SEQ ID NO: 900 - protein, 7 aa, Synthetic construct
RKQHLTL

SEQ ID NO: 901 - protein, 7 aa, Synthetic construct
DRGNLTR

SEQ ID NO: 902 - protein, 7 aa, Synthetic construct
RNTNLTR

SEQ ID NO: 903 - protein, 7 aa, Synthetic construct
RREHLVR

SEQ ID NO: 904 - protein, 7 aa, Synthetic construct
RREHLVR

SEQ ID NO: 905 - protein, 7 aa, Synthetic construct
DPSNLQR

SEQ ID NO: 906 - protein, 7 aa, Synthetic construct
RNTNLTR

SEQ ID NO: 907 - protein, 7 aa, Synthetic construct
RREHLVR

SEQ ID NO: 908 - protein, 7 aa, Synthetic construct
RTDTLAR

SEQ ID NO: 909 - protein, 7 aa, Synthetic construct
RVDDLGR

SEQ ID NO: 910 - protein, 7 aa, Synthetic construct
QSHSLKS

SEQ ID NO: 911 - protein, 7 aa, Synthetic construct
ESGHLKR

SEQ ID NO: 912 - protein, 7 aa, Synthetic construct
DLSTLRR

SEQ ID NO: 913 - protein, 7 aa, Synthetic construct
QNEHLKV

SEQ ID NO: 914 - protein, 7 aa, Synthetic construct
RPENLNR

SEQ ID NO: 915 - protein, 7 aa, Synthetic construct
RRDNLNR

SEQ ID NO: 916 - protein, 7 aa, Synthetic construct
ERRGLDR

SEQ ID NO: 917 - protein, 7 aa, Synthetic construct
DRGNLTR

SEQ ID NO: 918 - protein, 7 aa, Synthetic construct
LSQTLNR

SEQ ID NO: 919 - protein, 7 aa, Synthetic construct
IKHHLGR

SEQ ID NO: 920 - protein, 7 aa, Synthetic construct
RNFILQR

SEQ ID NO: 921 - protein, 7 aa, Synthetic construct
ERHQLVR

SEQ ID NO: 922 - protein, 7 aa, Synthetic construct
QREHLVT

SEQ ID NO: 923 - protein, 7 aa, Synthetic construct
RIDNLGR

SEQ ID NO: 924 - protein, 7 aa, Synthetic construct
RMSNLVR

SEQ ID NO: 925 - protein, 7 aa, Synthetic construct
RNESLKV

SEQ ID NO: 926 - protein, 7 aa, Synthetic construct
RADNLGR

SEQ ID NO: 927 - protein, 7 aa, Synthetic construct
ARNTLKG

SEQ ID NO: 928 - protein, 7 aa, Synthetic construct
QSHSLKS

SEQ ID NO: 929 - protein, 7 aa, Synthetic construct
EKSHLTR

SEQ ID NO: 930 - protein, 7 aa, Synthetic construct
DSPTLRR

SEQ ID NO: 931 - protein, 7 aa, Synthetic construct
QKVHLQV

SEQ ID NO: 932 - protein, 7 aa, Synthetic construct
RAENLAR

SEQ ID NO: 933 - protein, 7 aa, Synthetic construct
RRDNLLR

SEQ ID NO: 934 - protein, 7 aa, Synthetic construct
HKSSLTR

SEQ ID NO: 935 - protein, 7 aa, Synthetic construct
RPDNLPR

SEQ ID NO: 936 - protein, 7 aa, Synthetic construct
QGTHLRN

SEQ ID NO: 937 - protein, 7 aa, Synthetic construct
RTHHLIT

SEQ ID NO: 938 - protein, 7 aa, Synthetic construct
TPSKLDR

SEQ ID NO: 939 - protein, 7 aa, Synthetic construct
RQDNLGR

SEQ ID NO: 940 - protein, 7 aa, Synthetic construct
ERAKLIR

SEQ ID NO: 941 - protein, 7 aa, Synthetic construct
DPSNLRR

SEQ ID NO: 942 - protein, 7 aa, Synthetic construct
RQDNLGR

SEQ ID NO: 943 - protein, 7 aa, Synthetic construct
DQGNLGR

SEQ ID NO: 944 - protein, 7 aa, Synthetic construct
QSAHLKR

SEQ ID NO: 945 - protein, 7 aa, Synthetic construct
QDVSLVR

SEQ ID NO: 946 - protein, 7 aa, Synthetic construct
TPSKLDR

SEQ ID NO: 947 - protein, 7 aa, Synthetic construct
LAENLRR

SEQ ID NO: 948 - protein, 7 aa, Synthetic construct
RQDNLGR

SEQ ID NO: 949 - protein, 7 aa, Synthetic construct
DGGNLGR

SEQ ID NO: 950 - protein, 7 aa, Synthetic construct
QSPHLKR

SEQ ID NO: 951 - protein, 7 aa, Synthetic construct
QSTSLQR

SEQ ID NO: 952 - protein, 7 aa, Synthetic construct
TPSKLDR

SEQ ID NO: 953 - protein, 7 aa, Synthetic construct
DSSNLRR

SEQ ID NO: 954 - protein, 7 aa, Synthetic construct
RQDNLGR

SEQ ID NO: 955 - protein, 7 aa, Synthetic construct
EGGNLMR

SEQ ID NO: 956 - protein, 7 aa, Synthetic construct
QQAHLVR

SEQ ID NO: 957 - protein, 7 aa, Synthetic construct
QAETLKR

SEQ ID NO: 958 - protein, 7 aa, Synthetic construct
QRPHLTN

SEQ ID NO: 959 - protein, 7 aa, Synthetic construct
QAATLQR

SEQ ID NO: 960 - protein, 7 aa, Synthetic construct
RKECLVV

SEQ ID NO: 961 - protein, 7 aa, Synthetic construct
QNPHLLR

SEQ ID NO: 962 - protein, 7 aa, Synthetic construct
QSAHLKR

SEQ ID NO: 963 - protein, 7 aa, Synthetic construct
RSDHLSL

SEQ ID NO: 964 - protein, 7 aa, Synthetic construct
DPSVLTR

SEQ ID NO: 965 - protein, 7 aa, Synthetic construct
EHRGLKR

SEQ ID NO: 966 - protein, 7 aa, Synthetic construct
VPSKLKR

SEQ ID NO: 967 - protein, 7 aa, Synthetic construct
RDDTLVR

SEQ ID NO: 968 - protein, 7 aa, Synthetic construct
QKETLNR

SEQ ID NO: 969 - protein, 7 aa, Synthetic construct
VRSSLRR

SEQ ID NO: 970 - protein, 7 aa, Synthetic construct
DPSVLTR

SEQ ID NO: 971 - protein, 7 aa, Synthetic construct
EHRGLKR

SEQ ID NO: 972 - protein, 7 aa, Synthetic construct
KTDHLAR

SEQ ID NO: 973 - protein, 7 aa, Synthetic construct
DKAHLVR

SEQ ID NO: 974 - protein, 7 aa, Synthetic construct
QKETLNR

SEQ ID NO: 975 - protein, 7 aa, Synthetic construct
VRSSLRR

SEQ ID NO: 976 - protein, 7 aa, Synthetic construct
RADNLGR

SEQ ID NO: 977 - protein, 7 aa, Synthetic construct
KQVTLRN

SEQ ID NO: 978 - protein, 7 aa, Synthetic construct
KHSNLTR

SEQ ID NO: 979 - protein, 7 aa, Synthetic construct
RREHLVR

SEQ ID NO: 980 - protein, 7 aa, Synthetic construct
VKSSLTR

SEQ ID NO: 981 - protein, 7 aa, Synthetic construct
VSNSLNR

SEQ ID NO: 982 - protein, 7 aa, Synthetic construct
RDDNLQR

SEQ ID NO: 983 - protein, 7 aa, Synthetic construct
KNVTLTN

SEQ ID NO: 984 - protein, 7 aa, Synthetic construct
QSAHLKR

SEQ ID NO: 985 - protein, 7 aa, Synthetic construct
RSDHLSL

SEQ ID NO: 986 - protein, 7 aa, Synthetic construct
VKSSLTR

SEQ ID NO: 987 - protein, 7 aa, Synthetic construct
VSNSLNR

SEQ ID NO: 988 - protein, 7 aa, Synthetic construct
DPSVLKR

SEQ ID NO: 989 - protein, 7 aa, Synthetic construct
RTEHLAR

SEQ ID NO: 990 - protein, 7 aa, Synthetic construct
QSPHLKR

SEQ ID NO: 991 - protein, 7 aa, Synthetic construct
DQTTLRR

SEQ ID NO: 992 - protein, 7 aa, Synthetic construct
KHSNLTR

SEQ ID NO: 993 - protein, 7 aa, Synthetic construct
QMETLKR

SEQ ID NO: 994 - protein, 7 aa, Synthetic construct
QNQNLAR

SEQ ID NO: 995 - protein, 7 aa, Synthetic construct
DKSVLAR

SEQ ID NO: 996 - protein, 7 aa, Synthetic construct
RDDNLQR

SEQ ID NO: 997 - protein, 7 aa, Synthetic construct
KNVTLTN

SEQ ID NO: 998 - protein, 7 aa, Synthetic construct
QSAHLKR

SEQ ID NO: 999 - protein, 7 aa, Synthetic construct
RSDHLSL

SEQ ID NO: 1000 - protein, 7 aa, Synthetic construct
KHSNLTR

SEQ ID NO: 1001 - protein, 7 aa, Synthetic construct
RREHLTI

SEQ ID NO: 1002 - protein, 7 aa, Synthetic construct
KKDHLHR

SEQ ID NO: 1003 - protein, 7 aa, Synthetic construct
QTTTLKR

SEQ ID NO: 1004 - protein, 7 aa, Synthetic construct
EEHHLTR

SEQ ID NO: 1005 - protein, 7 aa, Synthetic construct
REDVLGR

SEQ ID NO: 1006 - protein, 7 aa, Synthetic construct
KHSNLTR

SEQ ID NO: 1007 - protein, 7 aa, Synthetic construct
RREHLTI

SEQ ID NO: 1008 - protein, 7 aa, Synthetic construct
KKDHLHR

SEQ ID NO: 1009 - protein, 7 aa, Synthetic construct
QTTTLKR

SEQ ID NO: 1010 - protein, 7 aa, Synthetic construct
EAHHLSR

SEQ ID NO: 1011 - protein, 7 aa, Synthetic construct
RTDDLGR

SEQ ID NO: 1012 - protein, 7 aa, Synthetic construct
LRQTLAR

SEQ ID NO: 1013 - protein, 7 aa, Synthetic construct
VAHSLKR

SEQ ID NO: 1014 - protein, 7 aa, Synthetic construct
DRSVLVR

SEQ ID NO: 1015 - protein, 7 aa, Synthetic construct
QNSHLRR

SEQ ID NO: 1016 - protein, 7 aa, Synthetic construct
VKHSLQR

SEQ ID NO: 1017 - protein, 7 aa, Synthetic construct
QTTHLSR

SEQ ID NO: 1018 - protein, 7 aa, Synthetic construct
QSAHLKR

SEQ ID NO: 1019 - protein, 7 aa, Synthetic construct
QMSHLKR

SEQ ID NO: 1020 - protein, 7 aa, Synthetic construct
RGNHLRR

SEQ ID NO: 1021 - protein, 7 aa, Synthetic construct
LKEHLTR

SEQ ID NO: 1022 - protein, 7 aa, Synthetic construct
RNEHLKV

SEQ ID NO: 1023 - protein, 7 aa, Synthetic construct
QSTTLKR

SEQ ID NO: 1024 - protein, 7 aa, Synthetic construct
RKPHLDN

SEQ ID NO: 1025 - protein, 7 aa, Synthetic construct
RPDVLMR

SEQ ID NO: 1026 - protein, 7 aa, Synthetic construct
RDDNLQR

SEQ ID NO: 1027 - protein, 7 aa, Synthetic construct
RMEHLPR

SEQ ID NO: 1028 - protein, 7 aa, Synthetic construct
HQSSLTR

SEQ ID NO: 1029 - protein, 7 aa, Synthetic construct
VSNSLAR

SEQ ID NO: 1030 - protein, 7 aa, Synthetic construct
RNIHLQT

SEQ ID NO: 1031 - protein, 7 aa, Synthetic construct
RKDTLAR

SEQ ID NO: 1032 - protein, 7 aa, Synthetic construct
RADNLGR

SEQ ID NO: 1033 - protein, 7 aa, Synthetic construct
RMEHLPR

SEQ ID NO: 1034 - protein, 7 aa, Synthetic construct
HQSSLTR

SEQ ID NO: 1035 - protein, 7 aa, Synthetic construct
VSNSLAR

SEQ ID NO: 1036 - DNA, 20 bp, Homo sapiens
  source 1..20: mol_type = genomic DNA
ggtgctagccttgcgttccg

SEQ ID NO: 1037 - DNA, 20 bp, Homo sapiens
  source 1..20: mol_type = genomic DNA
ctggccgaagcacccgagca

SEQ ID NO: 1038 - DNA, 20 bp, Homo sapiens
  source 1..20: mol_type = genomic DNA
tgcggaaaccttctagggtg

SEQ ID NO: 1039 - DNA, 20 bp, Homo sapiens
  source 1..20: mol_type = genomic DNA
gcggaaaccttctagggtgt

SEQ ID NO: 1040 - DNA, 20 bp, Homo sapiens
  source 1..20: mol_type = genomic DNA
tcaagcacccacaccctaga

SEQ ID NO: 1041 - DNA, 20 bp, Homo sapiens
  source 1..20: mol_type = genomic DNA
gggtgtgggtgcttgacgcc

SEQ ID NO: 1042 - DNA, 20 bp, Homo sapiens
  source 1..20: mol_type = genomic DNA
ggtgtgggtgcttgacgcct

SEQ ID NO: 1043 - DNA, 20 bp, Homo sapiens
  source 1..20: mol_type = genomic DNA
gtgtgggtgcttgacgcctg

SEQ ID NO: 1044 - DNA, 20 bp, Homo sapiens
  source 1..20: mol_type = genomic DNA
actgcctggctcactcctcc

SEQ ID NO: 1045 - DNA, 20 bp, Homo sapiens
  source 1..20: mol_type = genomic DNA
tcacgccaccagagccccat

SEQ ID NO: 1046 - DNA, 20 bp, Homo sapiens
  source 1..20: mol_type = genomic DNA
atcgtccgatggggctctgg

SEQ ID NO: 1047 - DNA, 20 bp, Homo sapiens
  source 1..20: mol_type = genomic DNA
aggatcgtccgatggggctc

SEQ ID NO: 1048 - DNA, 20 bp, Homo sapiens
  source 1..20: mol_type = genomic DNA
tcagataggatcgtccgatg

SEQ ID NO: 1049 - DNA, 20 bp, Homo sapiens
  source 1..20: mol_type = genomic DNA
gcggctcccagctcccagcc

SEQ ID NO: 1050 - DNA, 20 bp, Homo sapiens
  source 1..20: mol_type = genomic DNA
cggaatcctggctgggagct

SEQ ID NO: 1051 - DNA, 20 bp, Homo sapiens
  source 1..20: mol_type = genomic DNA
gcggaatcctggctgggagc

SEQ ID NO: 1052 - DNA, 20 bp, Homo sapiens
  source 1..20: mol_type = genomic DNA
gggcgcgcggaatcctggct

SEQ ID NO: 1053 - DNA, 20 bp, Homo sapiens
  source 1..20: mol_type = genomic DNA
ggggcgcgcggaatcctggc

SEQ ID NO: 1054 - DNA, 20 bp, Homo sapiens
  source 1..20: mol_type = genomic DNA
tgaggtctttgcaaacaaag

SEQ ID NO: 1055 - DNA, 20 bp, Homo sapiens
  source 1..20: mol_type = genomic DNA
ccagcacctagattcagagc

SEQ ID NO: 1056 - DNA, 20 bp, Homo sapiens
  source 1..20: mol_type = genomic DNA
cctgctctgaatctaggtgc

SEQ ID NO: 1057 - DNA, 20 bp, Homo sapiens
  source 1..20: mol_type = genomic DNA
tcgatactgggaagaaacaa

SEQ ID NO: 1058 - DNA, 20 bp, Homo sapiens
  source 1..20: mol_type = genomic DNA
ctggaagggctgtcgatact

SEQ ID NO: 1059 - DNA, 20 bp, Homo sapiens
  source 1..20: mol_type = genomic DNA
tctggaagggctgtcgatac

SEQ ID NO: 1060 - DNA, 20 bp, Homo sapiens
  source 1..20: mol_type = genomic DNA
gaggcttgctctttctggaa

SEQ ID NO: 1061 - DNA, 20 bp, Homo sapiens
  source 1..20: mol_type = genomic DNA
tgaggcttgctctttctgga

SEQ ID NO: 1062 - DNA, 20 bp, Homo sapiens
  source 1..20: mol_type = genomic DNA
gacatgaggcttgctctttc

SEQ ID NO: 1063 - DNA, 20 bp, Homo sapiens
  source 1..20: mol_type = genomic DNA
tgtacatgtggcatgacatg

SEQ ID NO: 1064 - DNA, 20 bp, Homo sapiens
  source 1..20: mol_type = genomic DNA
catgccacatgtacaatctg

SEQ ID NO: 1065 - DNA, 20 bp, Homo sapiens
  source 1..20: mol_type = genomic DNA
cacatgtacaatctgaggcc

SEQ ID NO: 1066 - DNA, 20 bp, Homo sapiens
  source 1..20: mol_type = genomic DNA
ctggcctcagattgtacatg

SEQ ID NO: 1067 - DNA, 20 bp, Homo sapiens
  source 1..20: mol_type = genomic DNA
aaaaggggaaagagagctcc

SEQ ID NO: 1068 - DNA, 20 bp, Homo sapiens
  source 1..20: mol_type = genomic DNA
ccaggcaggaggatgaaaag

SEQ ID NO: 1069 - DNA, 20 bp, Homo sapiens
  source 1..20: mol_type = genomic DNA
accaggcaggaggatgaaaa

SEQ ID NO: 1070 - DNA, 20 bp, Homo sapiens
  source 1..20: mol_type = genomic DNA
taccaggcaggaggatgaaa

SEQ ID NO: 1071 - DNA, 20 bp, Homo sapiens
  source 1..20: mol_type = genomic DNA
cctcctgcctggtacacaat

SEQ ID NO: 1072 - DNA, 20 bp, Homo sapiens
  source 1..20: mol_type = genomic DNA
cctattgtgtaccaggcagg

SEQ ID NO: 1073 - DNA, 20 bp, Homo sapiens
  source 1..20: mol_type = genomic DNA
acacctattgtgtaccaggc

SEQ ID NO: 1074 - DNA, 20 bp, Homo sapiens
  source 1..20: mol_type = genomic DNA
ggtacacaataggtgtttac

SEQ ID NO: 1075 - DNA, 20 bp, Homo sapiens
  source 1..20: mol_type = genomic DNA
gtaaacacctattgtgtacc

SEQ ID NO: 1076 - DNA, 20 bp, Homo sapiens
  source 1..20: mol_type = genomic DNA
tccagttgatttcttgaaca

SEQ ID NO: 1077 - DNA, 20 bp, Homo sapiens
  source 1..20: mol_type = genomic DNA
accatgttcaagaaatcaac

SEQ ID NO: 1078 - DNA, 20 bp, Homo sapiens
  source 1..20: mol_type = genomic DNA
tcttgaacatggtgtgtaaa

SEQ ID NO: 1079 - DNA, 20 bp, Homo sapiens
  source 1..20: mol_type = genomic DNA
tctttgcaaattgaatcttc

SEQ ID NO: 1080 - DNA, 20 bp, Homo sapiens
  source 1..20: mol_type = genomic DNA
agtttgcaaagacgtcatat

SEQ ID NO: 1081 - DNA, 20 bp, Homo sapiens
  source 1..20: mol_type = genomic DNA
gatttatactacaaagattc

SEQ ID NO: 1082 - DNA, 20 bp, Homo sapiens
  source 1..20: mol_type = genomic DNA
agttggtaaggtcagtgtgc

SEQ ID NO: 1083 - DNA, 20 bp, Homo sapiens
  source 1..20: mol_type = genomic DNA
gttggtaaggtcagtgtgca

SEQ ID NO: 1084 - DNA, 20 bp, Homo sapiens
  source 1..20: mol_type = genomic DNA
gcagggtgcataaagggcag

SEQ ID NO: 1085 - DNA, 20 bp, Homo sapiens
  source 1..20: mol_type = genomic DNA
ggtgcataaagggcagaggc

SEQ ID NO: 1086 - DNA, 20 bp, Homo sapiens
  source 1..20: mol_type = genomic DNA
gcataaagggcagaggccgg

SEQ ID NO: 1087 - DNA, 20 bp, Homo sapiens
  source 1..20: mol_type = genomic DNA
tttagaaggctgccaggtta

SEQ ID NO: 1088 - DNA, 20 bp, Homo sapiens
  source 1..20: mol_type = genomic DNA
gcccaccgaattctttccac

SEQ ID NO: 1089 - DNA, 20 bp, Homo sapiens
  source 1..20: mol_type = genomic DNA
aaagaattcggtgggcagcg

SEQ ID NO: 1090 - DNA, 20 bp, Homo sapiens
  source 1..20: mol_type = genomic DNA
cttctgaatcaatcctactg

SEQ ID NO: 1091 - DNA, 20 bp, Homo sapiens
  source 1..20: mol_type = genomic DNA
ctggtcagcaggagacaagg

SEQ ID NO: 1092 - DNA, 20 bp, Homo sapiens
  source 1..20: mol_type = genomic DNA
gattgattcagaagtctcac

SEQ ID NO: 1093 - DNA, 20 bp, Homo sapiens
  source 1..20: mol_type = genomic DNA
cagaagtctcactggtcagc

SEQ ID NO: 1094 - DNA, 20 bp, Homo sapiens
  source 1..20: mol_type = genomic DNA
tcactggtcagcaggagaca

SEQ ID NO: 1095 - DNA, 20 bp, Homo sapiens
  source 1..20: mol_type = genomic DNA
gcaggagacaaggtggaccc

SEQ ID NO: 1096 - DNA, 20 bp, Homo sapiens
  source 1..20: mol_type = genomic DNA
ggacccaggaaacactgaaa

SEQ ID NO: 1097 - DNA, 20 bp, Homo sapiens
  source 1..20: mol_type = genomic DNA
cccaggaaacactgaaaagg

SEQ ID NO: 1098 - DNA, 20 bp, Homo sapiens
  source 1..20: mol_type = genomic DNA
ccaggaaacactgaaaaggt

SEQ ID NO: 1099 - DNA, 20 bp, Homo sapiens
  source 1..20: mol_type = genomic DNA
aaacactgaaaaggtgggcc

SEQ ID NO: 1100 - DNA, 20 bp, Homo sapiens
  source 1..20: mol_type = genomic DNA
tggagtctggcatcccacgc

SEQ ID NO: 1101 - DNA, 20 bp, Homo sapiens
  source 1..20: mol_type = genomic DNA
ggagtctggcatcccacgca

SEQ ID NO: 1102 - DNA, 20 bp, Homo sapiens
  source 1..20: mol_type = genomic DNA
cgggagaggaggagccccta

SEQ ID NO: 1103 - DNA, 20 bp, Homo sapiens
  source 1..20: mol_type = genomic DNA
aggaggagcccctagggcgc

SEQ ID NO: 1104 - DNA, 20 bp, Homo sapiens
  source 1..20: mol_type = genomic DNA
aaggcaggccggcgccctag

SEQ ID NO: 1105 - DNA, 20 bp, Homo sapiens
  source 1..20: mol_type = genomic DNA
gaaggcaggccggcgcccta

SEQ ID NO: 1106 - DNA, 20 bp, Homo sapiens
  source 1..20: mol_type = genomic DNA
ggaaggcaggccggcgccct

SEQ ID NO: 1107 - DNA, 20 bp, Homo sapiens
  source 1..20: mol_type = genomic DNA
aactgggctggaaggcaggc

SEQ ID NO: 1108 - DNA, 20 bp, Homo sapiens
  source 1..20: mol_type = genomic DNA
gcctgccttccagcccagtt

SEQ ID NO: 1109 - DNA, 20 bp, Homo sapiens
  source 1..20: mol_type = genomic DNA
tcctaactgggctggaaggc

SEQ ID NO: 1110 - DNA, 20 bp, Homo sapiens
  source 1..20: mol_type = genomic DNA
cttccagcccagttaggatt

SEQ ID NO: 1111 - DNA, 20 bp, Homo sapiens
  source 1..20: mol_type = genomic DNA
ttccagcccagttaggattt

SEQ ID NO: 1112 - DNA, 20 bp, Homo sapiens
  source 1..20: mol_type = genomic DNA
caaatcctaactgggctgga

SEQ ID NO: 1113 - DNA, 20 bp, Homo sapiens
  source 1..20: mol_type = genomic DNA
ctcccaaatcctaactgggc

SEQ ID NO: 1114 - DNA, 20 bp, Homo sapiens
  source 1..20: mol_type = genomic DNA
aaaactcccaaatcctaact

SEQ ID NO: 1115 - DNA, 20 bp, Homo sapiens
  source 1..20: mol_type = genomic DNA
aaaaactcccaaatcctaac

SEQ ID NO: 1116 - DNA, 20 bp, Homo sapiens
  source 1..20: mol_type = genomic DNA
agcgtcagattacgcgcaga

SEQ ID NO: 1117 - DNA, 20 bp, Homo sapiens
  source 1..20: mol_type = genomic DNA
cagcgtcagattacgcgcag

SEQ ID NO: 1118 - DNA, 20 bp, Homo sapiens
  source 1..20: mol_type = genomic DNA
gcgcgtaatctgacgctgtt

SEQ ID NO: 1119 - DNA, 20 bp, Homo sapiens
  source 1..20: mol_type = genomic DNA
cgcgtaatctgacgctgttt

SEQ ID NO: 1120 - DNA, 20 bp, Homo sapiens
  source 1..20: mol_type = genomic DNA
gcgtaatctgacgctgtttg

SEQ ID NO: 1121 - DNA, 20 bp, Homo sapiens
  source 1..20: mol_type = genomic DNA
taatctgacgctgtttgggg

SEQ ID NO: 1122 - DNA, 20 bp, Homo sapiens
  source 1..20: mol_type = genomic DNA
aatctgacgctgtttgggga

SEQ ID NO: 1123 - DNA, 20 bp, Homo sapiens
  source 1..20: mol_type = genomic DNA
gacgctgtttggggagggcg

SEQ ID NO: 1124 - DNA, 20 bp, Homo sapiens
  source 1..20: mol_type = genomic DNA
cgaaacctgatcctccagtc

SEQ ID NO: 1125 - DNA, 20 bp, Homo sapiens
  source 1..20: mol_type = genomic DNA
gaaacctgatcctccagtcc

SEQ ID NO: 1126 - DNA, 20 bp, Homo sapiens
  source 1..20: mol_type = genomic DNA
aaacctgatcctccagtccg

SEQ ID NO: 1127 - DNA, 20 bp, Homo sapiens
  source 1..20: mol_type = genomic DNA
cggactggaggatcaggttt

SEQ ID NO: 1128 - DNA, 20 bp, Homo sapiens
  source 1..20: mol_type = genomic DNA
aacctgatcctccagtccgg

SEQ ID NO: 1129 - DNA, 20 bp, Homo sapiens
  source 1..20: mol_type = genomic DNA
aacccccggactggaggatc

SEQ ID NO: 1130 - DNA, 20 bp, Homo sapiens
  source 1..20: mol_type = genomic DNA
taacggaacccccggactgg

SEQ ID NO: 1131 - DNA, 20 bp, Homo sapiens
  source 1..20: mol_type = genomic DNA
cattaacggaacccccggac

SEQ ID NO: 1132 - DNA, 20 bp, Homo sapiens
  source 1..20: mol_type = genomic DNA
ttaaacattaacggaacccc

SEQ ID NO: 1133 - DNA, 20 bp, Homo sapiens
  source 1..20: mol_type = genomic DNA
ccgttaatgtttaatcagat

SEQ ID NO: 1134 - DNA, 20 bp, Homo sapiens
  source 1..20: mol_type = genomic DNA
cctatctgattaaacattaa

SEQ ID NO: 1135 - DNA, 20 bp, Homo sapiens
  source 1..20: mol_type = genomic DNA
aatcagataggatcgtccga

SEQ ID NO: 1136 - DNA, 20 bp, Homo sapiens
  source 1..20: mol_type = genomic DNA
atcagataggatcgtccgat

SEQ ID NO: 1137 - DNA, 20 bp, Homo sapiens
  source 1..20: mol_type = genomic DNA
tggcgtgatctgcgcgcccc

SEQ ID NO: 1138 - DNA, 20 bp, Homo sapiens
  source 1..20: mol_type = genomic DNA
gtcgctgcggaaaccttcta

SEQ ID NO: 1139 - DNA, 20 bp, Homo sapiens
  source 1..20: mol_type = genomic DNA
cgtcgctgcggaaaccttct

SEQ ID NO: 1140 - DNA, 20 bp, Homo sapiens
  source 1..20: mol_type = genomic DNA
aggtttccgcagcgacgtcg

SEQ ID NO: 1141 - DNA, 20 bp, Homo sapiens
  source 1..20: mol_type = genomic DNA
cagcgacgtcgaggcgctca

SEQ ID NO: 1142 - DNA, 20 bp, Homo sapiens
  source 1..20: mol_type = genomic DNA
tgagcgcctcgacgtcgctg

SEQ ID NO: 1143 - DNA, 20 bp, Homo sapiens
  source 1..20: mol_type = genomic DNA
gtcgaggcgctcatggttgc

SEQ ID NO: 1144 - DNA, 20 bp, Homo sapiens
  source 1..20: mol_type = genomic DNA
gaggcgctcatggttgcagg

SEQ ID NO: 1145 - DNA, 20 bp, Homo sapiens
  source 1..20: mol_type = genomic DNA
aggcgctcatggttgcaggc

SEQ ID NO: 1146 - DNA, 20 bp, Homo sapiens
  source 1..20: mol_type = genomic DNA
agttcagggtctgagcctgg

SEQ ID NO: 1147 - DNA, 20 bp, Homo sapiens
  source 1..20: mol_type = genomic DNA
cgggcgccgccgttcagttc

SEQ ID NO: 1148 - DNA, 20 bp, Homo sapiens
  source 1..20: mol_type = genomic DNA
gggcgccgccgttcagttca

SEQ ID NO: 1149 - DNA, 20 bp, Homo sapiens
  source 1..20: mol_type = genomic DNA
tcagaccctgaactgaacgg

SEQ ID NO: 1150 - DNA, 20 bp, Homo sapiens
  source 1..20: mol_type = genomic DNA
ggctcagaccctgaactgaa

SEQ ID NO: 1151 - DNA, 20 bp, Homo sapiens
  source 1..20: mol_type = genomic DNA
ttcagttcagggtctgagcc

SEQ ID NO: 1152 - DNA, 20 bp, Homo sapiens
  source 1..20: mol_type = genomic DNA
tgagcctggaggagtgagcc

SEQ ID NO: 1153 - DNA, 20 bp, Homo sapiens
  source 1..20: mol_type = genomic DNA
agtgagccaggcagtgagac

SEQ ID NO: 1154 - DNA, 20 bp, Homo sapiens
  source 1..20: mol_type = genomic DNA
gccaggcagtgagactggct

SEQ ID NO: 1155 - DNA, 20 bp, Homo sapiens
  source 1..20: mol_type = genomic DNA
ccaggcagtgagactggctc

SEQ ID NO: 1156 - DNA, 20 bp, Homo sapiens
  source 1..20: mol_type = genomic DNA
cccgagccagtctcactgcc

SEQ ID NO: 1157 - DNA, 20 bp, Homo sapiens
  source 1..20: mol_type = genomic DNA
ggcagtgagactggctcggg

SEQ ID NO: 1158 - DNA, 20 bp, Homo sapiens
  source 1..20: mol_type = genomic DNA
gcagtgagactggctcgggc

SEQ ID NO: 1159 - DNA, 20 bp, Homo sapiens
  source 1..20: mol_type = genomic DNA
tgagactggctcgggcgggc

SEQ ID NO: 1160 - DNA, 20 bp, Homo sapiens
  source 1..20: mol_type = genomic DNA
gagactggctcgggcgggcc

SEQ ID NO: 1161 - DNA, 20 bp, Homo sapiens
  source 1..20: mol_type = genomic DNA
gggacgcgtcgttgcagcag

SEQ ID NO: 1162 - DNA, 20 bp, Homo sapiens
  source 1..20: mol_type = genomic DNA
gctgctgcaacgacgcgtcc

SEQ ID NO: 1163 - DNA, 20 bp, Homo sapiens
  source 1..20: mol_type = genomic DNA
tgaaggggcgcgcggaatcc

SEQ ID NO: 1164 - DNA, 20 bp, Homo sapiens
  source 1..20: mol_type = genomic DNA
agggcgcgtgaaggggcgcg

SEQ ID NO: 1165 - DNA, 20 bp, Homo sapiens
  source 1..20: mol_type = genomic DNA
caggagcagggcgcgtgaag

SEQ ID NO: 1166 - DNA, 20 bp, Homo sapiens
  source 1..20: mol_type = genomic DNA
tcaggagcagggcgcgtgaa

SEQ ID NO: 1167 - DNA, 20 bp, Homo sapiens
  source 1..20: mol_type = genomic DNA
ttcaggagcagggcgcgtga

SEQ ID NO: 1168 - DNA, 20 bp, Homo sapiens
  source 1..20: mol_type = genomic DNA
ggagctgaagttcaggagca

SEQ ID NO: 1169 - DNA, 20 bp, Homo sapiens
  source 1..20: mol_type = genomic DNA
aggagctgaagttcaggagc

SEQ ID NO: 1170 - DNA, 20 bp, Homo sapiens
  source 1..20: mol_type = genomic DNA
ctgtgcaggagctgaagttc

SEQ ID NO: 1171 - DNA, 20 bp, Homo sapiens
  source 1..20: mol_type = genomic DNA
gcacagtcctccccaccgca

SEQ ID NO: 1172 - DNA, 20 bp, Homo sapiens
  source 1..20: mol_type = genomic DNA
tgcggtggggaggactgtgc

SEQ ID NO: 1173 - DNA, 20 bp, Homo sapiens
  source 1..20: mol_type = genomic DNA
cctccccaccgcaaggctca

SEQ ID NO: 1174 - DNA, 20 bp, Homo sapiens
  source 1..20: mol_type = genomic DNA
ccttgagccttgcggtgggg

SEQ ID NO: 1175 - DNA, 20 bp, Homo sapiens
  source 1..20: mol_type = genomic DNA
gcgccttgagccttgcggtg

SEQ ID NO: 1176 - DNA, 20 bp, Homo sapiens
  source 1..20: mol_type = genomic DNA
ggcgccttgagccttgcggt

SEQ ID NO: 1177 - DNA, 20 bp, Homo sapiens
  source 1..20: mol_type = genomic DNA
cggcgccttgagccttgcgg

SEQ ID NO: 1178 - DNA, 20 bp, Homo sapiens
  source 1..20: mol_type = genomic DNA
cgcaaggctcaaggcgccgc

SEQ ID NO: 1179 - DNA, 20 bp, Homo sapiens
  source 1..20: mol_type = genomic DNA
ggctcaaggcgccgccggcg

SEQ ID NO: 1180 - DNA, 20 bp, Homo sapiens
  source 1..20: mol_type = genomic DNA
aggccgtgcgcggtccacgc

SEQ ID NO: 1181 - DNA, 20 bp, Homo sapiens
  source 1..20: mol_type = genomic DNA
gtggaccgcgcacggcctct

SEQ ID NO: 1182 - DNA, 20 bp, Homo sapiens
  source 1..20: mol_type = genomic DNA
ggagacctagaggccgtgcg

SEQ ID NO: 1183 - DNA, 20 bp, Homo sapiens
  source 1..20: mol_type = genomic DNA
caggacagcaacctctcccc

SEQ ID NO: 1184 - DNA, 20 bp, Homo sapiens
  source 1..20: mol_type = genomic DNA
tgggcaccgtcagctccagg

SEQ ID NO: 1185 - DNA, 20 bp, Homo sapiens
  source 1..20: mol_type = genomic DNA
ccgtcagctccaggcggtcc

SEQ ID NO: 1186 - DNA, 20 bp, Homo sapiens
  source 1..20: mol_type = genomic DNA
ccaggaccgcctggagctga

SEQ ID NO: 1187 - DNA, 20 bp, Homo sapiens
  source 1..20: mol_type = genomic DNA
tcagctccaggcggtcctgg

SEQ ID NO: 1188 - DNA, 20 bp, Homo sapiens
  source 1..20: mol_type = genomic DNA
cagcggccaccaggaccgcc

SEQ ID NO: 1189 - DNA, 20 bp, Homo sapiens
  source 1..20: mol_type = genomic DNA
ctgctgctcctgggtcccgc

SEQ ID NO: 1190 - DNA, 20 bp, Homo sapiens
  source 1..20: mol_type = genomic DNA
cacgggcgcccgcgggaccc

SEQ ID NO: 1191 - DNA, 20 bp, Homo sapiens
  source 1..20: mol_type = genomic DNA
tcccgcgggcgcccgtgcgc

SEQ ID NO: 1192 - DNA, 20 bp, Homo sapiens
  source 1..20: mol_type = genomic DNA
cgcgggcgcccgtgcgcagg

SEQ ID NO: 1193 - DNA, 20 bp, Homo sapiens
  source 1..20: mol_type = genomic DNA
tcctgcgcacgggcgcccgc

SEQ ID NO: 1194 - DNA, 20 bp, Homo sapiens
  source 1..20: mol_type = genomic DNA
ctcctgcgcacgggcgcccg

SEQ ID NO: 1195 - DNA, 20 bp, Homo sapiens
  source 1..20: mol_type = genomic DNA
cgcccgtgcgcaggaggacg

SEQ ID NO: 1196 - DNA, 20 bp, Homo sapiens
  source 1..20: mol_type = genomic DNA
cgtgcgcaggaggacgagga

SEQ ID NO: 1197 - DNA, 20 bp, Homo sapiens
  source 1..20: mol_type = genomic DNA
gtcctcgtcctcctgcgcac

SEQ ID NO: 1198 - DNA, 20 bp, Homo sapiens
  source 1..20: mol_type = genomic DNA
cgtcctcgtcctcctgcgca

SEQ ID NO: 1199 - DNA, 20 bp, Homo sapiens
  source 1..20: mol_type = genomic DNA
ggacgaggacggcgactacg

SEQ ID NO: 1200 - DNA, 20 bp, Homo sapiens
  source 1..20: mol_type = genomic DNA
ggacggcgactacgaggagc

SEQ ID NO: 1201 - DNA, 20 bp, Homo sapiens
  source 1..20: mol_type = genomic DNA
gctagccttgcgttccgagg

SEQ ID NO: 1202 - DNA, 20 bp, Homo sapiens
  source 1..20: mol_type = genomic DNA
gccttgcgttccgaggagga

SEQ ID NO: 1203 - DNA, 20 bp, Homo sapiens
  source 1..20: mol_type = genomic DNA
gccgtcctcctcggaacgca

SEQ ID NO: 1204 - DNA, 20 bp, Homo sapiens
  source 1..20: mol_type = genomic DNA
gcgttccgaggaggacggcc

SEQ ID NO: 1205 - DNA, 20 bp, Homo sapiens
  source 1..20: mol_type = genomic DNA
ttcggccaggccgtcctcct

SEQ ID NO: 1206 - DNA, 20 bp, Homo sapiens
  source 1..20: mol_type = genomic DNA
cgtgctcgggtgcttcggcc

SEQ ID NO: 1207 - DNA, 20 bp, Homo sapiens
  source 1..20: mol_type = genomic DNA
gtggctgtggttccgtgctc

SEQ ID NO: 1208 - DNA, 20 bp, Homo sapiens
  source 1..20: mol_type = genomic DNA
ggtggctgtggttccgtgct

SEQ ID NO: 1209 - DNA, 20 bp, Homo sapiens
  source 1..20: mol_type = genomic DNA
gcagcggtggaaggtggctg

SEQ ID NO: 1210 - DNA, 20 bp, Homo sapiens
  source 1..20: mol_type = genomic DNA
caccttccaccgctgcgcca

SEQ ID NO: 1211 - DNA, 20 bp, Homo sapiens
  source 1..20: mol_type = genomic DNA
cttggcgcagcggtggaagg

SEQ ID NO: 1212 - DNA, 20 bp, Homo sapiens
  source 1..20: mol_type = genomic DNA
caccttggcgcagcggtgga

SEQ ID NO: 1213 - DNA, 20 bp, Homo sapiens
  source 1..20: mol_type = genomic DNA
tccaccgctgcgccaaggtg

SEQ ID NO: 1214 - DNA, 20 bp, Homo sapiens
  source 1..20: mol_type = genomic DNA
ccaccgctgcgccaaggtgc

SEQ ID NO: 1215 - DNA, 20 bp, Homo sapiens
  source 1..20: mol_type = genomic DNA
cccgcaccttggcgcagcgg

SEQ ID NO: 1216 - DNA, 20 bp, Homo sapiens
  source 1..20: mol_type = genomic DNA
gggcgaacccgcagccggga

SEQ ID NO: 1217 - DNA, 20 bp, Homo sapiens
  source 1..20: mol_type = genomic DNA
tcccggctgcgggttcgccc

SEQ ID NO: 1218 - DNA, 20 bp, Homo sapiens
  source 1..20: mol_type = genomic DNA
caccgcaccgtcccggctgc

SEQ ID NO: 1219 - DNA, 20 bp, Homo sapiens
  source 1..20: mol_type = genomic DNA
gcaccgcaccgtcccggctg

SEQ ID NO: 1220 - DNA, 20 bp, Homo sapiens
  source 1..20: mol_type = genomic DNA
gaaacagcaccgcaccgtcc

SEQ ID NO: 1221 - DNA, 20 bp, Homo sapiens
  source 1..20: mol_type = genomic DNA
ggtgcggtgctgtttcctct

SEQ ID NO: 1222 - DNA, 20 bp, Homo sapiens
  source 1..20: mol_type = genomic DNA
gtgcggtgctgtttcctctc

SEQ ID NO: 1223 - DNA, 20 bp, Homo sapiens
  source 1..20: mol_type = genomic DNA
gggggaaactgaggcccgag

SEQ ID NO: 1224 - DNA, 20 bp, Homo sapiens
  source 1..20: mol_type = genomic DNA
agtttccccccatgtaagag

SEQ ID NO: 1225 - DNA, 20 bp, Homo sapiens
  source 1..20: mol_type = genomic DNA
cccccatgtaagagaggaag

SEQ ID NO: 1226 - DNA, 20 bp, Homo sapiens
  source 1..20: mol_type = genomic DNA
cacttcctctcttacatggg

SEQ ID NO: 1227 - DNA, 20 bp, Homo sapiens
  source 1..20: mol_type = genomic DNA
ccacttcctctcttacatgg

SEQ ID NO: 1228 - DNA, 20 bp, Homo sapiens
  source 1..20: mol_type = genomic DNA
taagagaggaagtggagtgc

SEQ ID NO: 1229 - DNA, 20 bp, Homo sapiens
  source 1..20: mol_type = genomic DNA
gtcgccgagggctcttcgct

SEQ ID NO: 1230 - DNA, 20 bp, Homo sapiens
  source 1..20: mol_type = genomic DNA
cgtgccaagcgaagagccct

SEQ ID NO: 1231 - DNA, 20 bp, Homo sapiens
  source 1..20: mol_type = genomic DNA
ctcttcgcttggcacgatct

SEQ ID NO: 1232 - DNA, 20 bp, Homo sapiens
  source 1..20: mol_type = genomic DNA
tcttcgcttggcacgatctt

SEQ ID NO: 1233 - DNA, 20 bp, Homo sapiens
  source 1..20: mol_type = genomic DNA
cttcgcttggcacgatcttg

SEQ ID NO: 1234 - DNA, 20 bp, Homo sapiens
  source 1..20: mol_type = genomic DNA
ggcacgatcttggggactgc

SEQ ID NO: 1235 - DNA, 20 bp, Homo sapiens
  source 1..20: mol_type = genomic DNA
gatcttggggactgcaggca

SEQ ID NO: 1236 - DNA, 20 bp, Homo sapiens
  source 1..20: mol_type = genomic DNA
cttggggactgcaggcaagg

SEQ ID NO: 1237 - DNA, 20 bp, Homo sapiens
  source 1..20: mol_type = genomic DNA
ggactgcaggcaaggcggcg

SEQ ID NO: 1238 - DNA, 20 bp, Homo sapiens
  source 1..20: mol_type = genomic DNA
gactgcaggcaaggcggcgg

SEQ ID NO: 1239 - DNA, 20 bp, Homo sapiens
  source 1..20: mol_type = genomic DNA
tgcaggcaaggcggcggggg

SEQ ID NO: 1240 - DNA, 20 bp, Homo sapiens
  source 1..20: mol_type = genomic DNA
ggcaaggcggcgggggagga

SEQ ID NO: 1241 - DNA, 20 bp, Homo sapiens
  source 1..20: mol_type = genomic DNA
gcaaggcggcgggggaggac

SEQ ID NO: 1242 - DNA, 20 bp, Homo sapiens
  source 1..20: mol_type = genomic DNA
gtggggagcacggtggagag

SEQ ID NO: 1243 - DNA, 20 bp, Homo sapiens
  source 1..20: mol_type = genomic DNA
tggggagcacggtggagagc

SEQ ID NO: 1244 - DNA, 20 bp, Homo sapiens
  source 1..20: mol_type = genomic DNA
ggggagcacggtggagagcg

SEQ ID NO: 1245 - DNA, 20 bp, Homo sapiens
  source 1..20: mol_type = genomic DNA
agcacggtggagagcgggga

SEQ ID NO: 1246 - DNA, 20 bp, Homo sapiens
  source 1..20: mol_type = genomic DNA
cggtggagagcggggacggc

SEQ ID NO: 1247 - DNA, 20 bp, Homo sapiens
  source 1..20: mol_type = genomic DNA
cgtgcggctgcgctattcag

SEQ ID NO: 1248 - DNA, 20 bp, Homo sapiens
  source 1..20: mol_type = genomic DNA
gtgcggctgcgctattcagt

SEQ ID NO: 1249 - DNA, 20 bp, Homo sapiens
  source 1..20: mol_type = genomic DNA
ggctgcgctattcagtggga

SEQ ID NO: 1250 - DNA, 20 bp, Homo sapiens
  source 1..20: mol_type = genomic DNA
ctattcagtgggaaggttcg

SEQ ID NO: 1251 - DNA, 20 bp, Homo sapiens
  source 1..20: mol_type = genomic DNA
tattcagtgggaaggttcgc

SEQ ID NO: 1252 - DNA, 20 bp, Homo sapiens
  source 1..20: mol_type = genomic DNA
attcagtgggaaggttcgcg

SEQ ID NO: 1253 - DNA, 20 bp, Homo sapiens
  source 1..20: mol_type = genomic DNA
agtgggaaggttcgcggggt

SEQ ID NO: 1254 - DNA, 20 bp, Homo sapiens
  source 1..20: mol_type = genomic DNA
gtgggaaggttcgcggggtt

SEQ ID NO: 1255 - DNA, 20 bp, Homo sapiens
  source 1..20: mol_type = genomic DNA
agggcgagcagagcactgcc

SEQ ID NO: 1256 - DNA, 20 bp, Homo sapiens
  source 1..20: mol_type = genomic DNA
tttctgcctcgccgcggcac

SEQ ID NO: 1257 - DNA, 20 bp, Homo sapiens
  source 1..20: mol_type = genomic DNA
ctgcctcgccgcggcacagg

SEQ ID NO: 1258 - DNA, 20 bp, Homo sapiens
  source 1..20: mol_type = genomic DNA
tgcctcgccgcggcacaggt

SEQ ID NO: 1259 - DNA, 20 bp, Homo sapiens
  source 1..20: mol_type = genomic DNA
cacccacctgtgccgcggcg

SEQ ID NO: 1260 - DNA, 20 bp, Homo sapiens
  source 1..20: mol_type = genomic DNA
tccttcacccacctgtgccg

SEQ ID NO: 1261 - DNA, 20 bp, Homo sapiens
  source 1..20: mol_type = genomic DNA
tgggtgaaggagtgaatgcc

SEQ ID NO: 1262 - RNA, 20 nt, Synthetic construct
  source 1..20: mol_type = other RNA
  modified_base 1..2: mod_base = OTHER; note = phosphorothioate linkage
  modified_base 2..3: mod_base = OTHER; note = phosphorothioate linkage
  modified_base 3..4: mod_base = OTHER; note = phosphorothioate linkage
  modified_base 17..18: mod_base = OTHER; note = phosphorothioate linkage
  modified_base 18..19: mod_base = OTHER; note = phosphorothioate linkage
  modified_base 19..20: mod_base = OTHER; note = phosphorothioate linkage
  modified_base 1: mod_base = gm
  modified_base 2: mod_base = gm
  modified_base 3: mod_base = um
  modified_base 18: mod_base = um
  modified_base 19: mod_base = um
  modified_base 20: mod_base = um
ggtgctagccttgcgttccg

SEQ ID NO: 1263 - RNA, 20 nt, Synthetic construct
  source 1..20: mol_type = other RNA
ctggccgaagcacccgagca

SEQ ID NO: 1264 - RNA, 20 nt, Synthetic construct
  source 1..20: mol_type = other RNA
  modified_base 1..2: mod_base = OTHER; note = phosphorothioate linkage
  modified_base 2..3: mod_base = OTHER; note = phosphorothioate linkage
  modified_base 3..4: mod_base = OTHER; note = phosphorothioate linkage
  modified_base 17..18: mod_base = OTHER; note = phosphorothioate linkage
  modified_base 18..19: mod_base = OTHER; note = phosphorothioate linkage
  modified_base 19..20: mod_base = OTHER; note = phosphorothioate linkage
  modified_base 1: mod_base = um
  modified_base 2: mod_base = gm
  modified_base 3: mod_base = cm
  modified_base 18: mod_base = um
  modified_base 19: mod_base = um
  modified_base 20: mod_base = um
tgcggaaaccttctagggtg

SEQ ID NO: 1265 - RNA, 20 nt, Synthetic construct
  source 1..20: mol_type = other RNA
  modified_base 1..2: mod_base = OTHER; note = phosphorothioate linkage
  modified_base 2..3: mod_base = OTHER; note = phosphorothioate linkage
  modified_base 3..4: mod_base = OTHER; note = phosphorothioate linkage
  modified_base 17..18: mod_base = OTHER; note = phosphorothioate linkage
  modified_base 18..19: mod_base = OTHER; note = phosphorothioate linkage
  modified_base 19..20: mod_base = OTHER; note = phosphorothioate linkage
  modified_base 1: mod_base = gm
  modified_base 2: mod_base = cm
  modified_base 3: mod_base = gm
  modified_base 18: mod_base = um
  modified_base 19: mod_base = um
  modified_base 20: mod_base = um
gcggaaaccttctagggtgt

SEQ ID NO: 1266 - RNA, 20 nt, Synthetic construct
  source 1..20: mol_type = other RNA
  modified_base 1..2: mod_base = OTHER; note = phosphorothioate linkage
  modified_base 2..3: mod_base = OTHER; note = phosphorothioate linkage
  modified_base 3..4: mod_base = OTHER; note = phosphorothioate linkage
  modified_base 1: mod_base = um
  modified_base 2: mod_base = cm
  modified_base 3: mod_base = OTHER; note = 2prime-O-methyladenosine
  modified_base 18: mod_base = um
  modified_base 19: mod_base = um
  modified_base 20: mod_base = um
tcaagcacccacaccctaga

SEQ ID NO: 1267 - RNA, 20 nt, Synthetic construct
  source 1..20: mol_type = other RNA
  modified_base 1..2: mod_base = OTHER; note = phosphorothioate linkage
  modified_base 2..3: mod_base = OTHER; note = phosphorothioate linkage
  modified_base 3..4: mod_base = OTHER; note = phosphorothioate linkage
  modified_base 17..18: mod_base = OTHER; note = phosphorothioate linkage
  modified_base 18..19: mod_base = OTHER; note = phosphorothioate linkage
  modified_base 19..20: mod_base = OTHER; note = phosphorothioate linkage
  modified_base 1: mod_base = gm
  modified_base 2: mod_base = gm
  modified_base 3: mod_base = gm
  modified_base 18: mod_base = um
  modified_base 19: mod_base = um
  modified_base 20: mod_base = um
gggtgtgggtgcttgacgcc

SEQ ID NO: 1268 - RNA, 20 nt, Synthetic construct
  source 1..20: mol_type = other RNA
  modified_base 1..2: mod_base = OTHER; note = phosphorothioate linkage
  modified_base 2..3: mod_base = OTHER; note = phosphorothioate linkage
  modified_base 3..4: mod_base = OTHER; note = phosphorothioate linkage
  modified_base 17..18: mod_base = OTHER; note = phosphorothioate linkage
  modified_base 18..19: mod_base = OTHER; note = phosphorothioate linkage
  modified_base 19..20: mod_base = OTHER; note = phosphorothioate linkage
  modified_base 1: mod_base = gm
  modified_base 2: mod_base = gm
  modified_base 3: mod_base = um
  modified_base 18: mod_base = um
  modified_base 19: mod_base = um
  modified_base 20: mod_base = um
ggtgtgggtgcttgacgcct

SEQ ID NO: 1269 - RNA, 20 nt, Synthetic construct
  source 1..20: mol_type = other RNA
  modified_base 1..2: mod_base = OTHER; note = phosphorothioate linkage
  modified_base 2..3: mod_base = OTHER; note = phosphorothioate linkage
  modified_base 3..4: mod_base = OTHER; note = phosphorothioate linkage
  modified_base 17..18: mod_base = OTHER; note = phosphorothioate linkage
  modified_base 18..19: mod_base = OTHER; note = phosphorothioate linkage
  modified_base 19..20: mod_base = OTHER; note = phosphorothioate linkage
  modified_base 1: mod_base = gm
  modified_base 2: mod_base = um
  modified_base 3: mod_base = gm
  modified_base 18: mod_base = um
  modified_base 19: mod_base = um
  modified_base 20: mod_base = um
gtgtgggtgcttgacgcctg

SEQ ID NO: 1270 - RNA, 20 nt, Synthetic construct
  source 1..20: mol_type = other RNA
  modified_base 1: mod_base = OTHER; note = 2prime-O-methyladenosine
  modified_base 2: mod_base = cm
  modified_base 3: mod_base = um
  modified_base 18: mod_base = um
  modified_base 19: mod_base = um
  modified_base 20: mod_base = um
  modified_base 1..2: mod_base = OTHER; note = phosphorothioate linkage
  modified_base 2..3: mod_base = OTHER; note = phosphorothioate linkage
  modified_base 3..4: mod_base = OTHER; note = phosphorothioate linkage
  modified_base 17..18: mod_base = OTHER; note = phosphorothioate linkage
  modified_base 18..19: mod_base = OTHER; note = phosphorothioate linkage
  modified_base 19..20: mod_base = OTHER; note = phosphorothioate linkage
actgcctggctcactcctcc

SEQ ID NO: 1271 - RNA, 20 nt, Synthetic construct
  source 1..20: mol_type = other RNA
tcacgccaccagagccccat

SEQ ID NO: 1272 - RNA, 20 nt, Synthetic construct
  source 1..20: mol_type = other RNA
  modified_base 1..2: mod_base = OTHER; note = phosphorothioate linkage
  modified_base 2..3: mod_base = OTHER; note = phosphorothioate linkage
  modified_base 3..4: mod_base = OTHER; note = phosphorothioate linkage
  modified_base 17..18: mod_base = OTHER; note = phosphorothioate linkage
  modified_base 18..19: mod_base = OTHER; note = phosphorothioate linkage
  modified_base 19..20: mod_base = OTHER; note = phosphorothioate linkage
  modified_base 1: mod_base = OTHER; note = 2prime-O-methyladenosine
  modified_base 2: mod_base = um
  modified_base 3: mod_base = cm
  modified_base 18: mod_base = um
  modified_base 19: mod_base = um
  modified_base 20: mod_base = um
atcgtccgatggggctctgg

SEQ ID NO: 1273 - RNA, 20 nt, Synthetic construct
  source 1..20: mol_type = other RNA
  modified_base 1..2: mod_base = OTHER; note = phosphorothioate linkage
  modified_base 2..3: mod_base = OTHER; note = phosphorothioate linkage
  modified_base 3..4: mod_base = OTHER; note = phosphorothioate linkage
  modified_base 17..18: mod_base = OTHER; note = phosphorothioate linkage
  modified_base 18..19: mod_base = OTHER; note = phosphorothioate linkage
  modified_base 19..20: mod_base = OTHER; note = phosphorothioate linkage
  modified_base 1: mod_base = OTHER; note = 2prime-O-methyladenosine
  modified_base 2: mod_base = gm
  modified_base 3: mod_base = gm
  modified_base 18: mod_base = um
  modified_base 19: mod_base = um
  modified_base 20: mod_base = um
aggatcgtccgatggggctc

SEQ ID NO: 1274 - RNA, 20 nt, Synthetic construct
  source 1..20: mol_type = other RNA
  modified_base 1..2: mod_base = OTHER; note = phosphorothioate linkage
  modified_base 2..3: mod_base = OTHER; note = phosphorothioate linkage
  modified_base 3..4: mod_base = OTHER; note = phosphorothioate linkage
  modified_base 17..18: mod_base = OTHER; note = phosphorothioate linkage
  modified_base 18..19: mod_base = OTHER; note = phosphorothioate linkage
  modified_base 19..20: mod_base = OTHER; note = phosphorothioate linkage
  modified_base 1: mod_base = um
  modified_base 2: mod_base = cm
  modified_base 3: mod_base = OTHER; note = 2prime-O-methyladenosine
  modified_base 18: mod_base = um
  modified_base 19: mod_base = um
  modified_base 20: mod_base = um
tcagataggatcgtccgatg

SEQ ID NO: 1275 - RNA, 20 nt, Synthetic construct
  source 1..20: mol_type = other RNA
gcggctcccagctcccagcc

SEQ ID NO: 1276 - RNA, 20 nt, Synthetic construct
  source 1..20: mol_type = other RNA
  modified_base 1..2: mod_base = OTHER; note = phosphorothioate linkage
  modified_base 2..3: mod_base = OTHER; note = phosphorothioate linkage
  modified_base 3..4: mod_base = OTHER; note = phosphorothioate linkage
  modified_base 17..18: mod_base = OTHER; note = phosphorothioate linkage
  modified_base 18..19: mod_base = OTHER; note = phosphorothioate linkage
  modified_base 19..20: mod_base = OTHER; note = phosphorothioate linkage
  modified_base 1: mod_base = cm
  modified_base 2: mod_base = gm
  modified_base 3: mod_base = gm
  modified_base 18: mod_base = um
  modified_base 19: mod_base = um
  modified_base 20: mod_base = um
cggaatcctggctgggagct

SEQ ID NO: 1277 - RNA, 20 nt, Synthetic construct
  source 1..20: mol_type = other RNA
gcggaatcctggctgggagc

SEQ ID NO: 1278 - RNA, 20 nt, Synthetic construct
  source 1..20: mol_type = other RNA
gggcgcgcggaatcctggct

SEQ ID NO: 1279 - RNA, 20 nt, Synthetic construct
  source 1..20: mol_type = other RNA
ggggcgcgcggaatcctggc

SEQ ID NO: 1280 - RNA, 20 nt, Synthetic construct
  source 1..20: mol_type = other RNA
tgaggtctttgcaaacaaag

SEQ ID NO: 1281 - RNA, 20 nt, Synthetic construct
  source 1..20: mol_type = other RNA
ccagcacctagattcagagc

SEQ ID NO: 1282 - RNA, 20 nt, Synthetic construct
  source 1..20: mol_type = other RNA
cctgctctgaatctaggtgc

SEQ ID NO: 1283 - RNA, 20 nt, Synthetic construct
  source 1..20: mol_type = other RNA
tcgatactgggaagaaacaa

SEQ ID NO: 1284 - RNA, 20 nt, Synthetic construct
  source 1..20: mol_type = other RNA
ctggaagggctgtcgatact

SEQ ID NO: 1285 - RNA, 20 nt, Synthetic construct
  source 1..20: mol_type = other RNA
tctggaagggctgtcgatac

SEQ ID NO: 1286 - RNA, 20 nt, Synthetic construct
  source 1..20: mol_type = other RNA
gaggcttgctctttctggaa

SEQ ID NO: 1287 - RNA, 20 nt, Synthetic construct
  source 1..20: mol_type = other RNA
tgaggcttgctctttctgga

SEQ ID NO: 1288 - RNA, 20 nt, Synthetic construct
  source 1..20: mol_type = other RNA
gacatgaggcttgctctttc

SEQ ID NO: 1289 - RNA, 20 nt, Synthetic construct
  source 1..20: mol_type = other RNA
tgtacatgtggcatgacatg

SEQ ID NO: 1290 - RNA, 20 nt, Synthetic construct
  source 1..20: mol_type = other RNA
catgccacatgtacaatctg

SEQ ID NO: 1291 - RNA, 20 nt, Synthetic construct
  source 1..20: mol_type = other RNA
cacatgtacaatctgaggcc

SEQ ID NO: 1292 - RNA, 20 nt, Synthetic construct
  source 1..20: mol_type = other RNA
ctggcctcagattgtacatg

SEQ ID NO: 1293 - RNA, 20 nt, Synthetic construct
  source 1..20: mol_type = other RNA
aaaaggggaaagagagctcc

SEQ ID NO: 1294 - RNA, 20 nt, Synthetic construct
  source 1..20: mol_type = other RNA
ccaggcaggaggatgaaaag

SEQ ID NO: 1295 - RNA, 20 nt, Synthetic construct
  source 1..20: mol_type = other RNA
accaggcaggaggatgaaaa

SEQ ID NO: 1296 - RNA, 20 nt, Synthetic construct
  source 1..20: mol_type = other RNA
taccaggcaggaggatgaaa

SEQ ID NO: 1297 - RNA, 20 nt, Synthetic construct
  source 1..20: mol_type = other RNA
cctcctgcctggtacacaat

SEQ ID NO: 1298 - RNA, 20 nt, Synthetic construct
  source 1..20: mol_type = other RNA
cctattgtgtaccaggcagg

SEQ ID NO: 1299 - RNA, 20 nt, Synthetic construct
  source 1..20: mol_type = other RNA
acacctattgtgtaccaggc

SEQ ID NO: 1300 - RNA, 20 nt, Synthetic construct
  source 1..20: mol_type = other RNA
ggtacacaataggtgtttac

SEQ ID NO: 1301 - RNA, 20 nt, Synthetic construct
  source 1..20: mol_type = other RNA
gtaaacacctattgtgtacc

SEQ ID NO: 1302 - RNA, 20 nt, Synthetic construct
  source 1..20: mol_type = other RNA
tccagttgatttcttgaaca

SEQ ID NO: 1303 - RNA, 20 nt, Synthetic construct
  source 1..20: mol_type = other RNA
accatgttcaagaaatcaac

SEQ ID NO: 1304 - RNA, 20 nt, Synthetic construct
  source 1..20: mol_type = other RNA
tcttgaacatggtgtgtaaa

SEQ ID NO: 1305 - RNA, 20 nt, Synthetic construct
  source 1..20: mol_type = other RNA
tctttgcaaattgaatcttc

SEQ ID NO: 1306 - RNA, 20 nt, Synthetic construct
  source 1..20: mol_type = other RNA
agtttgcaaagacgtcatat

SEQ ID NO: 1307 - RNA, 20 nt, Synthetic construct
  source 1..20: mol_type = other RNA
gatttatactacaaagattc

SEQ ID NO: 1308 - RNA, 20 nt, Synthetic construct
  source 1..20: mol_type = other RNA
agttggtaaggtcagtgtgc

SEQ ID NO: 1309 - RNA, 20 nt, Synthetic construct
  source 1..20: mol_type = other RNA
gttggtaaggtcagtgtgca

SEQ ID NO: 1310 - RNA, 20 nt, Synthetic construct
  source 1..20: mol_type = other RNA
gcagggtgcataaagggcag

SEQ ID NO: 1311 - RNA, 20 nt, Synthetic construct
  source 1..20: mol_type = other RNA
ggtgcataaagggcagaggc

SEQ ID NO: 1312 - RNA, 20 nt, Synthetic construct
  source 1..20: mol_type = other RNA
gcataaagggcagaggccgg

SEQ ID NO: 1313 - RNA, 20 nt, Synthetic construct
  source 1..20: mol_type = other RNA
tttagaaggctgccaggtta

SEQ ID NO: 1314 - RNA, 20 nt, Synthetic construct
  source 1..20: mol_type = other RNA
gcccaccgaattctttccac

SEQ ID NO: 1315 - RNA, 20 nt, Synthetic construct
  source 1..20: mol_type = other RNA
aaagaattcggtgggcagcg

SEQ ID NO: 1316 - RNA, 20 nt, Synthetic construct
  source 1..20: mol_type = other RNA
cttctgaatcaatcctactg

SEQ ID NO: 1317 - RNA, 20 nt, Synthetic construct
  source 1..20: mol_type = other RNA
ctggtcagcaggagacaagg

SEQ ID NO: 1318 - RNA, 20 nt, Synthetic construct
  source 1..20: mol_type = other RNA
gattgattcagaagtctcac

SEQ ID NO: 1319 - RNA, 20 nt, Synthetic construct
  source 1..20: mol_type = other RNA
cagaagtctcactggtcagc

SEQ ID NO: 1320 - RNA, 20 nt, Synthetic construct
  source 1..20: mol_type = other RNA
tcactggtcagcaggagaca

SEQ ID NO: 1321 - RNA, 20 nt, Synthetic construct
  source 1..20: mol_type = other RNA
  modified_base 1..2: mod_base = OTHER; note = phosphorothioate linkage
  modified_base 2..3: mod_base = OTHER; note = phosphorothioate linkage
  modified_base 3..4: mod_base = OTHER; note = phosphorothioate linkage
  modified_base 17..18: mod_base = OTHER; note = phosphorothioate linkage
  modified_base 18..19: mod_base = OTHER; note = phosphorothioate linkage
  modified_base 19..20: mod_base = OTHER; note = phosphorothioate linkage
  modified_base 1: mod_base = gm
  modified_base 2: mod_base = cm
  modified_base 3: mod_base = OTHER; note = 2prime-O-methyladenosine
  modified_base 18: mod_base = um
  modified_base 19: mod_base = um
  modified_base 20: mod_base = um
gcaggagacaaggtggaccc

SEQ ID NO: 1322 - RNA, 20 nt, Synthetic construct
  source 1..20: mol_type = other RNA
ggacccaggaaacactgaaa

SEQ ID NO: 1323 - RNA, 20 nt, Synthetic construct
  source 1..20: mol_type = other RNA
cccaggaaacactgaaaagg

SEQ ID NO: 1324 - RNA, 20 nt, Synthetic construct
  source 1..20: mol_type = other RNA
ccaggaaacactgaaaaggt

SEQ ID NO: 1325 - RNA, 20 nt, Synthetic construct
  source 1..20: mol_type = other RNA
aaacactgaaaaggtgggcc

SEQ ID NO: 1326 - RNA, 20 nt, Synthetic construct
  source 1..20: mol_type = other RNA
tggagtctggcatcccacgc

SEQ ID NO: 1327 - RNA, 20 nt, Synthetic construct
  source 1..20: mol_type = other RNA
ggagtctggcatcccacgca

SEQ ID NO: 1328 - RNA, 20 nt, Synthetic construct
  source 1..20: mol_type = other RNA
cgggagaggaggagccccta

SEQ ID NO: 1329 - RNA, 20 nt, Synthetic construct
  source 1..20: mol_type = other RNA
aggaggagcccctagggcgc

SEQ ID NO: 1330 - RNA, 20 nt, Synthetic construct
  source 1..20: mol_type = other RNA
aaggcaggccggcgccctag

SEQ ID NO: 1331 - RNA, 20 nt, Synthetic construct
  source 1..20: mol_type = other RNA
gaaggcaggccggcgcccta

SEQ ID NO: 1332 - RNA, 20 nt, Synthetic construct
  source 1..20: mol_type = other RNA
ggaaggcaggccggcgccct

SEQ ID NO: 1333 - RNA, 20 nt, Synthetic construct
  source 1..20: mol_type = other RNA
aactgggctggaaggcaggc

SEQ ID NO: 1334 - RNA, 20 nt, Synthetic construct
  source 1..20: mol_type = other RNA
gcctgccttccagcccagtt

SEQ ID NO: 1335 - RNA, 20 nt, Synthetic construct
  source 1..20: mol_type = other RNA
tcctaactgggctggaaggc

SEQ ID NO: 1336 - RNA, 20 nt, Synthetic construct
  source 1..20: mol_type = other RNA
cttccagcccagttaggatt

SEQ ID NO: 1337 - RNA, 20 nt, Synthetic construct
  source 1..20: mol_type = other RNA
ttccagcccagttaggattt

SEQ ID NO: 1338 - RNA, 20 nt, Synthetic construct
  source 1..20: mol_type = other RNA
  modified_base 1..2: mod_base = OTHER; note = phosphorothioate linkage
  modified_base 2..3: mod_base = OTHER; note = phosphorothioate linkage
  modified_base 3..4: mod_base = OTHER; note = phosphorothioate linkage
  modified_base 17..18: mod_base = OTHER; note = phosphorothioate linkage
  modified_base 18..19: mod_base = OTHER; note = phosphorothioate linkage
  modified_base 19..20: mod_base = OTHER; note = phosphorothioate linkage
  modified_base 1: mod_base = cm
  modified_base 2: mod_base = OTHER; note = 2prime-O-methyladenosine
  modified_base 3: mod_base = OTHER; note = 2prime-O-methyladenosine
  modified_base 18: mod_base = um
  modified_base 19: mod_base = um
  modified_base 20: mod_base = um
caaatcctaactgggctgga

SEQ ID NO: 1339 - RNA, 20 nt, Synthetic construct
  source 1..20: mol_type = other RNA
ctcccaaatcctaactgggc

SEQ ID NO: 1340 - RNA, 20 nt, Synthetic construct
  source 1..20: mol_type = other RNA
aaaactcccaaatcctaact

SEQ ID NO: 1341 - RNA, 20 nt, Synthetic construct
  source 1..20: mol_type = other RNA
aaaaactcccaaatcctaac

SEQ ID NO: 1342 - RNA, 20 nt, Synthetic construct
  source 1..20: mol_type = other RNA
agcgtcagattacgcgcaga

SEQ ID NO: 1343 - RNA, 20 nt, Synthetic construct
  source 1..20: mol_type = other RNA
cagcgtcagattacgcgcag

SEQ ID NO: 1344 - RNA, 20 nt, Synthetic construct
  source 1..20: mol_type = other RNA
gcgcgtaatctgacgctgtt

SEQ ID NO: 1345 - RNA, 20 nt, Synthetic construct
  source 1..20: mol_type = other RNA
cgcgtaatctgacgctgttt

SEQ ID NO: 1346 - RNA, 20 nt, Synthetic construct
  source 1..20: mol_type = other RNA
gcgtaatctgacgctgtttg

SEQ ID NO: 1347 - RNA, 20 nt, Synthetic construct
  source 1..20: mol_type = other RNA
taatctgacgctgtttgggg

SEQ ID NO: 1348 - RNA, 20 nt, Synthetic construct
  source 1..20: mol_type = other RNA
aatctgacgctgtttgggga

SEQ ID NO: 1349 - RNA, 20 nt, Synthetic construct
  source 1..20: mol_type = other RNA
gacgctgtttggggagggcg

SEQ ID NO: 1350 - RNA, 20 nt, Synthetic construct
  source 1..20: mol_type = other RNA
cgaaacctgatcctccagtc

SEQ ID NO: 1351 - RNA, 20 nt, Synthetic construct
  source 1..20: mol_type = other RNA
gaaacctgatcctccagtcc

SEQ ID NO: 1352 - RNA, 20 nt, Synthetic construct
  source 1..20: mol_type = other RNA
aaacctgatcctccagtccg

SEQ ID NO: 1353 - RNA, 20 nt, Synthetic construct
  source 1..20: mol_type = other RNA
  modified_base 1..2: mod_base = OTHER; note = phosphorothioate linkage
  modified_base 2..3: mod_base = OTHER; note = phosphorothioate linkage
  modified_base 3..4: mod_base = OTHER; note = phosphorothioate linkage
  modified_base 17..18: mod_base = OTHER; note = phosphorothioate linkage
  modified_base 18..19: mod_base = OTHER; note = phosphorothioate linkage
  modified_base 19..20: mod_base = OTHER; note = phosphorothioate linkage
  modified_base 1: mod_base = cm
  modified_base 2: mod_base = gm
  modified_base 3: mod_base = gm
  modified_base 18: mod_base = um
  modified_base 19: mod_base = um
  modified_base 20: mod_base = um
cggactggaggatcaggttt

SEQ ID NO: 1354 - RNA, 20 nt, Synthetic construct
  source 1..20: mol_type = other RNA
  modified_base 1..2: mod_base = OTHER; note = phosphorothioate linkage
  modified_base 2..3: mod_base = OTHER; note = phosphorothioate linkage
  modified_base 3..4: mod_base = OTHER; note = phosphorothioate linkage
  modified_base 17..18: mod_base = OTHER; note = phosphorothioate linkage
  modified_base 18..19: mod_base = OTHER; note = phosphorothioate linkage
  modified_base 19..20: mod_base = OTHER; note = phosphorothioate linkage
  modified_base 1: mod_base = OTHER; note = 2prime-O-methyladenosine
  modified_base 2: mod_base = OTHER; note = 2prime-O-methyladenosine
  modified_base 3: mod_base = cm
  modified_base 18: mod_base = um
  modified_base 19: mod_base = um
  modified_base 20: mod_base = um
aacctgatcctccagtccgg

SEQ ID NO: 1355 - RNA, 20 nt, Synthetic construct
  source 1..20: mol_type = other RNA
  modified_base 1..2: mod_base = OTHER; note = phosphorothioate linkage
  modified_base 2..3: mod_base = OTHER; note = phosphorothioate linkage
  modified_base 3..4: mod_base = OTHER; note = phosphorothioate linkage
  modified_base 17..18: mod_base = OTHER; note = phosphorothioate linkage
  modified_base 18..19: mod_base = OTHER; note = phosphorothioate linkage
  modified_base 19..20: mod_base = OTHER; note = phosphorothioate linkage
  modified_base 1: mod_base = OTHER; note = 2prime-O-methyladenosine
  modified_base 2: mod_base = OTHER; note = 2prime-O-methyladenosine
  modified_base 3: mod_base = cm
  modified_base 19: mod_base = um
  modified_base 18: mod_base = um
  modified_base 20: mod_base = um
aacccccggactggaggatc

SEQ ID NO: 1356 - RNA, 20 nt, Synthetic construct
  source 1..20: mol_type = other RNA
  modified_base 1..2: mod_base = OTHER; note = phosphorothioate linkage
  modified_base 2..3: mod_base = OTHER; note = phosphorothioate linkage
  modified_base 3..4: mod_base = OTHER; note = phosphorothioate linkage
  modified_base 17..18: mod_base = OTHER; note = phosphorothioate linkage
  modified_base 18..19: mod_base = OTHER; note = phosphorothioate linkage
  modified_base 19..20: mod_base = OTHER; note = phosphorothioate linkage
  modified_base 1: mod_base = um
  modified_base 2: mod_base = OTHER; note = 2prime-O-methyladenosine
  modified_base 3: mod_base = OTHER; note = 2prime-O-methyladenosine
  modified_base 18: mod_base = um
  modified_base 19: mod_base = um
  modified_base 20: mod_base = um
taacggaacccccggactgg

SEQ ID NO: 1357 - RNA, 20 nt, Synthetic construct
  source 1..20: mol_type = other RNA
  modified_base 1..2: mod_base = OTHER; note = phosphorothioate linkage
  modified_base 2..3: mod_base = OTHER; note = phosphorothioate linkage
  modified_base 3..4: mod_base = OTHER; note = phosphorothioate linkage
  modified_base 17..18: mod_base = OTHER; note = phosphorothioate linkage
  modified_base 18..19: mod_base = OTHER; note = phosphorothioate linkage
  modified_base 19..20: mod_base = OTHER; note = phosphorothioate linkage
  modified_base 1: mod_base = cm
  modified_base 2: mod_base = OTHER; note = 2prime-O-methyladenosine
  modified_base 3: mod_base = um
  modified_base 18: mod_base = um
  modified_base 19: mod_base = um
  modified_base 20: mod_base = um
cattaacggaacccccggac

SEQ ID NO: 1358 - RNA, 20 nt, Synthetic construct
  source 1..20: mol_type = other RNA
ttaaacattaacggaacccc

SEQ ID NO: 1359 - RNA, 20 nt, Synthetic construct
  source 1..20: mol_type = other RNA
ccgttaatgtttaatcagat

SEQ ID NO: 1360 - RNA, 20 nt, Synthetic construct
  source 1..20: mol_type = other RNA
cctatctgattaaacattaa

SEQ ID NO: 1361 - RNA, 20 nt, Synthetic construct
  source 1..20: mol_type = other RNA
aatcagataggatcgtccga

SEQ ID NO: 1362 - RNA, 20 nt, Synthetic construct
  source 1..20: mol_type = other RNA
atcagataggatcgtccgat

SEQ ID NO: 1363 - RNA, 20 nt, Synthetic construct
  source 1..20: mol_type = other RNA
  modified_base 1..2: mod_base = OTHER; note = phosphorothioate linkage
  modified_base 2..3: mod_base = OTHER; note = phosphorothioate linkage
  modified_base 3..4: mod_base = OTHER; note = phosphorothioate linkage
  modified_base 17..18: mod_base = OTHER; note = phosphorothioate linkage
  modified_base 18..19: mod_base = OTHER; note = phosphorothioate linkage
  modified_base 19..20: mod_base = OTHER; note = phosphorothioate linkage
  modified_base 1: mod_base = um
  modified_base 2: mod_base = gm
  modified_base 3: mod_base = gm
  modified_base 18: mod_base = um
  modified_base 19: mod_base = um
  modified_base 20: mod_base = um
tggcgtgatctgcgcgcccc

SEQ ID NO: 1364 - RNA, 20 nt, Synthetic construct
  source 1..20: mol_type = other RNA
gtcgctgcggaaaccttcta

SEQ ID NO: 1365 - RNA, 20 nt, Synthetic construct
  source 1..20: mol_type = other RNA
cgtcgctgcggaaaccttct

SEQ ID NO: 1366 - RNA, 20 nt, Synthetic construct
  source 1..20: mol_type = other RNA
aggtttccgcagcgacgtcg

SEQ ID NO: 1367 - RNA, 20 nt, Synthetic construct
  source 1..20: mol_type = other RNA
cagcgacgtcgaggcgctca

SEQ ID NO: 1368 - RNA, 20 nt, Synthetic construct
  source 1..20: mol_type = other RNA
  modified_base 1..2: mod_base = OTHER; note = phosphorothioate linkage
  modified_base 2..3: mod_base = OTHER; note = phosphorothioate linkage
  modified_base 3..4: mod_base = OTHER; note = phosphorothioate linkage
  modified_base 17..18: mod_base = OTHER; note = phosphorothioate linkage
  modified_base 18..19: mod_base = OTHER; note = phosphorothioate linkage
  modified_base 19..20: mod_base = OTHER; note = phosphorothioate linkage
  modified_base 1: mod_base = um
  modified_base 2: mod_base = gm
  modified_base 3: mod_base = OTHER; note = 2prime-O-methyladenosine
  modified_base 18: mod_base = um
  modified_base 19: mod_base = um
  modified_base 20: mod_base = um
tgagcgcctcgacgtcgctg

SEQ ID NO: 1369 - RNA, 20 nt, Synthetic construct
  source 1..20: mol_type = other RNA
  modified_base 1..2: mod_base = OTHER; note = phosphorothioate linkage
  modified_base 2..3: mod_base = OTHER; note = phosphorothioate linkage
  modified_base 3..4: mod_base = OTHER; note = phosphorothioate linkage
  modified_base 17..18: mod_base = OTHER; note = phosphorothioate linkage
  modified_base 18..19: mod_base = OTHER; note = phosphorothioate linkage
  modified_base 19..20: mod_base = OTHER; note = phosphorothioate linkage
  modified_base 1: mod_base = gm
  modified_base 2: mod_base = um
  modified_base 3: mod_base = cm
  modified_base 18: mod_base = um
  modified_base 19: mod_base = um
  modified_base 20: mod_base = um
gtcgaggcgctcatggttgc

SEQ ID NO: 1370 - RNA, 20 nt, Synthetic construct
  source 1..20: mol_type = other RNA
  modified_base 1..2: mod_base = OTHER; note = phosphorothioate linkage
  modified_base 2..3: mod_base = OTHER; note = phosphorothioate linkage
  modified_base 3..4: mod_base = OTHER; note = phosphorothioate linkage
  modified_base 17..18: mod_base = OTHER; note = phosphorothioate linkage
  modified_base 18..19: mod_base = OTHER; note = phosphorothioate linkage
  modified_base 19..20: mod_base = OTHER; note = phosphorothioate linkage
  modified_base 1: mod_base = gm
  modified_base 2: mod_base = OTHER; note = 2prime-O-methyladenosine
  modified_base 3: mod_base = gm
  modified_base 18: mod_base = um
  modified_base 19: mod_base = um
  modified_base 20: mod_base = um
gaggcgctcatggttgcagg

SEQ ID NO: 1371 - RNA, 20 nt, Synthetic construct
  source 1..20: mol_type = other RNA
  modified_base 1..2: mod_base = OTHER; note = phosphorothioate linkage
  modified_base 2..3: mod_base = OTHER; note = phosphorothioate linkage
  modified_base 3..4: mod_base = OTHER; note = phosphorothioate linkage
  modified_base 17..18: mod_base = OTHER; note = phosphorothioate linkage
  modified_base 18..19: mod_base = OTHER; note = phosphorothioate linkage
  modified_base 19..20: mod_base = OTHER; note = phosphorothioate linkage
  modified_base 1: mod_base = OTHER; note = 2prime-O-methyladenosine
  modified_base 2: mod_base = gm
  modified_base 3: mod_base = gm
  modified_base 18: mod_base = um
  modified_base 19: mod_base = um
  modified_base 20: mod_base = um
aggcgctcatggttgcaggc

SEQ ID NO: 1372 - RNA, 20 nt, Synthetic construct
  source 1..20: mol_type = other RNA
  modified_base 1..2: mod_base = OTHER; note = phosphorothioate linkage
  modified_base 2..3: mod_base = OTHER; note = phosphorothioate linkage
  modified_base 3..4: mod_base = OTHER; note = phosphorothioate linkage
  modified_base 17..18: mod_base = OTHER; note = phosphorothioate linkage
  modified_base 18..19: mod_base = OTHER; note = phosphorothioate linkage
  modified_base 19..20: mod_base = OTHER; note = phosphorothioate linkage
  modified_base 1: mod_base = OTHER; note = 2prime-O-methyladenosine
  modified_base 2: mod_base = gm
  modified_base 3: mod_base = um
  modified_base 18: mod_base = um
  modified_base 19: mod_base = um
  modified_base 20: mod_base = um
agttcagggtctgagcctgg

SEQ ID NO: 1373 - RNA, 20 nt, Synthetic construct
  source 1..20: mol_type = other RNA
  modified_base 1..2: mod_base = OTHER; note = phosphorothioate linkage
  modified_base 2..3: mod_base = OTHER; note = phosphorothioate linkage
  modified_base 3..4: mod_base = OTHER; note = phosphorothioate linkage
  modified_base 17..18: mod_base = OTHER; note = phosphorothioate linkage
  modified_base 18..19: mod_base = OTHER; note = phosphorothioate linkage
  modified_base 19..20: mod_base = OTHER; note = phosphorothioate linkage
  modified_base 1: mod_base = cm
  modified_base 2: mod_base = gm
  modified_base 3: mod_base = gm
  modified_base 18: mod_base = um
  modified_base 19: mod_base = um
  modified_base 20: mod_base = um
cgggcgccgccgttcagttc

SEQ ID NO: 1374 - RNA, 20 nt, Synthetic construct
  source 1..20: mol_type = other RNA
  modified_base 1..2: mod_base = OTHER; note = phosphorothioate linkage
  modified_base 2..3: mod_base = OTHER; note = phosphorothioate linkage
  modified_base 3..4: mod_base = OTHER; note = phosphorothioate linkage
  modified_base 17..18: mod_base = OTHER; note = phosphorothioate linkage
  modified_base 18..19: mod_base = OTHER; note = phosphorothioate linkage
  modified_base 19..20: mod_base = OTHER; note = phosphorothioate linkage
  modified_base 1: mod_base = gm
  modified_base 2: mod_base = gm
  modified_base 3: mod_base = gm
  modified_base 18: mod_base = um
  modified_base 19: mod_base = um
  modified_base 20: mod_base = um
gggcgccgccgttcagttca

SEQ ID NO: 1375 - RNA, 20 nt, Synthetic construct
  source 1..20: mol_type = other RNA
tcagaccctgaactgaacgg

SEQ ID NO: 1376 - RNA, 20 nt, Synthetic construct
  source 1..20: mol_type = other RNA
ggctcagaccctgaactgaa

SEQ ID NO: 1377 - RNA, 20 nt, Synthetic construct
  source 1..20: mol_type = other RNA
ttcagttcagggtctgagcc

SEQ ID NO: 1378 - RNA, 20 nt, Synthetic construct
  source 1..20: mol_type = other RNA
tgagcctggaggagtgagcc

SEQ ID NO: 1379 - RNA, 20 nt, Synthetic construct
  source 1..20: mol_type = other RNA
agtgagccaggcagtgagac

SEQ ID NO: 1380 - RNA, 20 nt, Synthetic construct
  source 1..20: mol_type = other RNA
gccaggcagtgagactggct

SEQ ID NO: 1381 - RNA, 20 nt, Synthetic construct
  source 1..20: mol_type = other RNA
ccaggcagtgagactggctc

SEQ ID NO: 1382 - RNA, 20 nt, Synthetic construct
  source 1..20: mol_type = other RNA
cccgagccagtctcactgcc

SEQ ID NO: 1383 - RNA, 20 nt, Synthetic construct
  source 1..20: mol_type = other RNA
  modified_base 1..2: mod_base = OTHER; note = phosphorothioate linkage
  modified_base 2..3: mod_base = OTHER; note = phosphorothioate linkage
  modified_base 3..4: mod_base = OTHER; note = phosphorothioate linkage
  modified_base 17..18: mod_base = OTHER; note = phosphorothioate linkage
  modified_base 18..19: mod_base = OTHER; note = phosphorothioate linkage
  modified_base 19..20: mod_base = OTHER; note = phosphorothioate linkage
  modified_base 1: mod_base = gm
  modified_base 2: mod_base = gm
  modified_base 3: mod_base = cm
  modified_base 18: mod_base = um
  modified_base 19: mod_base = um
  modified_base 20: mod_base = um
ggcagtgagactggctcggg

SEQ ID NO: 1384 - RNA, 20 nt, Synthetic construct
  source 1..20: mol_type = other RNA
gcagtgagactggctcgggc

SEQ ID NO: 1385 - RNA, 20 nt, Synthetic construct
  source 1..20: mol_type = other RNA
tgagactggctcgggcgggc

SEQ ID NO: 1386 - RNA, 20 nt, Synthetic construct
  source 1..20: mol_type = other RNA
  modified_base 1..2: mod_base = OTHER; note = phosphorothioate linkage
  modified_base 2..3: mod_base = OTHER; note = phosphorothioate linkage
  modified_base 3..4: mod_base = OTHER; note = phosphorothioate linkage
  modified_base 17..18: mod_base = OTHER; note = phosphorothioate linkage
  modified_base 18..19: mod_base = OTHER; note = phosphorothioate linkage
  modified_base 19..20: mod_base = OTHER; note = phosphorothioate linkage
  modified_base 1: mod_base = gm
  modified_base 2: mod_base = OTHER; note = 2prime-O-methyladenosine
  modified_base 3: mod_base = gm
  modified_base 18: mod_base = um
  modified_base 19: mod_base = um
  modified_base 20: mod_base = um
gagactggctcgggcgggcc

SEQ ID NO: 1387 - RNA, 20 nt, Synthetic construct
  source 1..20: mol_type = other RNA
  modified_base 1..2: mod_base = OTHER; note = phosphorothioate linkage
  modified_base 2..3: mod_base = OTHER; note = phosphorothioate linkage
  modified_base 3..4: mod_base = OTHER; note = phosphorothioate linkage
  modified_base 17..18: mod_base = OTHER; note = phosphorothioate linkage
  modified_base 18..19: mod_base = OTHER; note = phosphorothioate linkage
  modified_base 19..20: mod_base = OTHER; note = phosphorothioate linkage
  modified_base 1: mod_base = gm
  modified_base 2: mod_base = gm
  modified_base 3: mod_base = gm
  modified_base 18: mod_base = um
  modified_base 19: mod_base = um
  modified_base 20: mod_base = um
gggacgcgtcgttgcagcag

SEQ ID NO: 1388 - RNA, 20 nt, Synthetic construct
  source 1..20: mol_type = other RNA
  modified_base 1..2: mod_base = OTHER; note = phosphorothioate linkage
  modified_base 2..3: mod_base = OTHER; note = phosphorothioate linkage
  modified_base 3..4: mod_base = OTHER; note = phosphorothioate linkage
  modified_base 17..18: mod_base = OTHER; note = phosphorothioate linkage
  modified_base 18..19: mod_base = OTHER; note = phosphorothioate linkage
  modified_base 19..20: mod_base = OTHER; note = phosphorothioate linkage
  modified_base 1: mod_base = gm
  modified_base 2: mod_base = cm
  modified_base 3: mod_base = um
  modified_base 18: mod_base = um
  modified_base 19: mod_base = um
  modified_base 20: mod_base = um
gctgctgcaacgacgcgtcc

SEQ ID NO: 1389 - RNA, 20 nt, Synthetic construct
  source 1..20: mol_type = other RNA
  modified_base 1..2: mod_base = OTHER; note = phosphorothioate linkage
  modified_base 2..3: mod_base = OTHER; note = phosphorothioate linkage
  modified_base 3..4: mod_base = OTHER; note = phosphorothioate linkage
  modified_base 17..18: mod_base = OTHER; note = phosphorothioate linkage
  modified_base 18..19: mod_base = OTHER; note = phosphorothioate linkage
  modified_base 19..20: mod_base = OTHER; note = phosphorothioate linkage
  modified_base 1: mod_base = um
  modified_base 2: mod_base = gm
  modified_base 3: mod_base = OTHER; note = 2prime-O-methyladenosine
  modified_base 18: mod_base = um
  modified_base 19: mod_base = um
  modified_base 20: mod_base = um
tgaaggggcgcgcggaatcc

SEQ ID NO: 1390 - RNA, 20 nt, Synthetic construct
  source 1..20: mol_type = other RNA
agggcgcgtgaaggggcgcg

SEQ ID NO: 1391 - RNA, 20 nt, Synthetic construct
  source 1..20: mol_type = other RNA
caggagcagggcgcgtgaag

SEQ ID NO: 1392 - RNA, 20 nt, Synthetic construct
  source 1..20: mol_type = other RNA
tcaggagcagggcgcgtgaa

SEQ ID NO: 1393 - RNA, 20 nt, Synthetic construct
  source 1..20: mol_type = other RNA
ttcaggagcagggcgcgtga

SEQ ID NO: 1394 - RNA, 20 nt, Synthetic construct
  source 1..20: mol_type = other RNA
ggagctgaagttcaggagca

SEQ ID NO: 1395 - RNA, 20 nt, Synthetic construct
  source 1..20: mol_type = other RNA
aggagctgaagttcaggagc

SEQ ID NO: 1396 - RNA, 20 nt, Synthetic construct
  source 1..20: mol_type = other RNA
ctgtgcaggagctgaagttc

SEQ ID NO: 1397 - RNA, 20 nt, Synthetic construct
  source 1..20: mol_type = other RNA
  modified_base 1..2: mod_base = OTHER; note = phosphorothioate linkage
  modified_base 2..3: mod_base = OTHER; note = phosphorothioate linkage
  modified_base 3..4: mod_base = OTHER; note = phosphorothioate linkage
  modified_base 17..18: mod_base = OTHER; note = phosphorothioate linkage
  modified_base 18..19: mod_base = OTHER; note = phosphorothioate linkage
  modified_base 19..20: mod_base = OTHER; note = phosphorothioate linkage
  modified_base 1: mod_base = gm
  modified_base 2: mod_base = cm
  modified_base 3: mod_base = OTHER; note = 2prime-O-methyladenosine
  modified_base 18: mod_base = um
  modified_base 19: mod_base = um
  modified_base 20: mod_base = um
gcacagtcctccccaccgca

SEQ ID NO: 1398 - RNA, 20 nt, Synthetic construct
  source 1..20: mol_type = other RNA
tgcggtggggaggactgtgc

SEQ ID NO: 1399 - RNA, 20 nt, Synthetic construct
  source 1..20: mol_type = other RNA
cctccccaccgcaaggctca

SEQ ID NO: 1400 - RNA, 20 nt, Synthetic construct
  source 1..20: mol_type = other RNA
ccttgagccttgcggtgggg

SEQ ID NO: 1401 - RNA, 20 nt, Synthetic construct
  source 1..20: mol_type = other RNA
gcgccttgagccttgcggtg

SEQ ID NO: 1402 - RNA, 20 nt, Synthetic construct
  source 1..20: mol_type = other RNA
ggcgccttgagccttgcggt

SEQ ID NO: 1403 - RNA, 20 nt, Synthetic construct
  source 1..20: mol_type = other RNA
cggcgccttgagccttgcgg

SEQ ID NO: 1404 - RNA, 20 nt, Synthetic construct
  source 1..20: mol_type = other RNA
cgcaaggctcaaggcgccgc

SEQ ID NO: 1405 - RNA, 20 nt, Synthetic construct
  source 1..20: mol_type = other RNA
  modified_base 1..2: mod_base = OTHER; note = phosphorothioate linkage
  modified_base 2..3: mod_base = OTHER; note = phosphorothioate linkage
  modified_base 3..4: mod_base = OTHER; note = phosphorothioate linkage
  modified_base 17..18: mod_base = OTHER; note = phosphorothioate linkage
  modified_base 18..19: mod_base = OTHER; note = phosphorothioate linkage
  modified_base 19..20: mod_base = OTHER; note = phosphorothioate linkage
  modified_base 1: mod_base = gm
  modified_base 2: mod_base = gm
  modified_base 3: mod_base = cm
  modified_base 18: mod_base = um
  modified_base 19: mod_base = um
  modified_base 20: mod_base = um
ggctcaaggcgccgccggcg

SEQ ID NO: 1406 - RNA, 20 nt, Synthetic construct
  source 1..20: mol_type = other RNA
aggccgtgcgcggtccacgc

SEQ ID NO: 1407 - RNA, 20 nt, Synthetic construct
  source 1..20: mol_type = other RNA
gtggaccgcgcacggcctct

SEQ ID NO: 1408 - RNA, 20 nt, Synthetic construct
  source 1..20: mol_type = other RNA
ggagacctagaggccgtgcg

SEQ ID NO: 1409 - RNA, 20 nt, Synthetic construct
  source 1..20: mol_type = other RNA
caggacagcaacctctcccc

SEQ ID NO: 1410 - RNA, 20 nt, Synthetic construct
  source 1..20: mol_type = other RNA
tgggcaccgtcagctccagg

SEQ ID NO: 1411 - RNA, 20 nt, Synthetic construct
  source 1..20: mol_type = other RNA
ccgtcagctccaggcggtcc

SEQ ID NO: 1412 - RNA, 20 nt, Synthetic construct
  source 1..20: mol_type = other RNA
ccaggaccgcctggagctga

SEQ ID NO: 1413 - RNA, 20 nt, Synthetic construct
  source 1..20: mol_type = other RNA
tcagctccaggcggtcctgg

SEQ ID NO: 1414 - RNA, 20 nt, Synthetic construct
  source 1..20: mol_type = other RNA
cagcggccaccaggaccgcc

SEQ ID NO: 1415 - RNA, 20 nt, Synthetic construct
  source 1..20: mol_type = other RNA
ctgctgctcctgggtcccgc

SEQ ID NO: 1416 - RNA, 20 nt, Synthetic construct
  source 1..20: mol_type = other RNA
cacgggcgcccgcgggaccc

SEQ ID NO: 1417 - RNA, 20 nt, Synthetic construct
  source 1..20: mol_type = other RNA
tcccgcgggcgcccgtgcgc

SEQ ID NO: 1418 - RNA, 20 nt, Synthetic construct
  source 1..20: mol_type = other RNA
cgcgggcgcccgtgcgcagg

SEQ ID NO: 1419 - RNA, 20 nt, Synthetic construct
  source 1..20: mol_type = other RNA
tcctgcgcacgggcgcccgc

SEQ ID NO: 1420 - RNA, 20 nt, Synthetic construct
  source 1..20: mol_type = other RNA
ctcctgcgcacgggcgcccg

SEQ ID NO: 1421 - RNA, 20 nt, Synthetic construct
  source 1..20: mol_type = other RNA
cgcccgtgcgcaggaggacg

SEQ ID NO: 1422 - RNA, 20 nt, Synthetic construct
  source 1..20: mol_type = other RNA
cgtgcgcaggaggacgagga

SEQ ID NO: 1423 - RNA, 20 nt, Synthetic construct
  source 1..20: mol_type = other RNA
gtcctcgtcctcctgcgcac

SEQ ID NO: 1424 - RNA, 20 nt, Synthetic construct
  source 1..20: mol_type = other RNA
cgtcctcgtcctcctgcgca

SEQ ID NO: 1425 - RNA, 20 nt, Synthetic construct
  source 1..20: mol_type = other RNA
ggacgaggacggcgactacg

SEQ ID NO: 1426 - RNA, 20 nt, Synthetic construct
  source 1..20: mol_type = other RNA
ggacggcgactacgaggagc

SEQ ID NO: 1427 - RNA, 20 nt, Synthetic construct
  source 1..20: mol_type = other RNA
gctagccttgcgttccgagg

SEQ ID NO: 1428 - RNA, 20 nt, Synthetic construct
  source 1..20: mol_type = other RNA
gccttgcgttccgaggagga

SEQ ID NO: 1429 - RNA, 20 nt, Synthetic construct
  source 1..20: mol_type = other RNA
gccgtcctcctcggaacgca

SEQ ID NO: 1430 - RNA, 20 nt, Synthetic construct
  source 1..20: mol_type = other RNA
gcgttccgaggaggacggcc

SEQ ID NO: 1431 - RNA, 20 nt, Synthetic construct
  source 1..20: mol_type = other RNA
  modified_base 1..2: mod_base = OTHER; note = phosphorothioate linkage
  modified_base 2..3: mod_base = OTHER; note = phosphorothioate linkage
  modified_base 3..4: mod_base = OTHER; note = phosphorothioate linkage
  modified_base 17..18: mod_base = OTHER; note = phosphorothioate linkage
  modified_base 18..19: mod_base = OTHER; note = phosphorothioate linkage
  modified_base 19..20: mod_base = OTHER; note = phosphorothioate linkage
  modified_base 1: mod_base = um
  modified_base 2: mod_base = um
  modified_base 3: mod_base = cm
  modified_base 18: mod_base = um
  modified_base 19: mod_base = um
  modified_base 20: mod_base = um
ttcggccaggccgtcctcct

SEQ ID NO: 1432 - RNA, 20 nt, Synthetic construct
  source 1..20: mol_type = other RNA
cgtgctcgggtgcttcggcc

SEQ ID NO: 1433 - RNA, 20 nt, Synthetic construct
  source 1..20: mol_type = other RNA
gtggctgtggttccgtgctc

SEQ ID NO: 1434 - RNA, 20 nt, Synthetic construct
  source 1..20: mol_type = other RNA
ggtggctgtggttccgtgct

SEQ ID NO: 1435 - RNA, 20 nt, Synthetic construct
  source 1..20: mol_type = other RNA
gcagcggtggaaggtggctg

SEQ ID NO: 1436 - RNA, 20 nt, Synthetic construct
  source 1..20: mol_type = other RNA
caccttccaccgctgcgcca

SEQ ID NO: 1437 - RNA, 20 nt, Synthetic construct
  source 1..20: mol_type = other RNA
cttggcgcagcggtggaagg

SEQ ID NO: 1438 - RNA, 20 nt, Synthetic construct
  source 1..20: mol_type = other RNA
caccttggcgcagcggtgga

SEQ ID NO: 1439 - RNA, 20 nt, Synthetic construct
  source 1..20: mol_type = other RNA
tccaccgctgcgccaaggtg

SEQ ID NO: 1440 - RNA, 20 nt, Synthetic construct
  source 1..20: mol_type = other RNA
ccaccgctgcgccaaggtgc

SEQ ID NO: 1441 - RNA, 20 nt, Synthetic construct
  source 1..20: mol_type = other RNA
  modified_base 1..2: mod_base = OTHER; note = phosphorothioate linkage
  modified_base 2..3: mod_base = OTHER; note = phosphorothioate linkage
  modified_base 3..4: mod_base = OTHER; note = phosphorothioate linkage
  modified_base 17..18: mod_base = OTHER; note = phosphorothioate linkage
  modified_base 18..19: mod_base = OTHER; note = phosphorothioate linkage
  modified_base 19..20: mod_base = OTHER; note = phosphorothioate linkage
  modified_base 1: mod_base = cm
  modified_base 2: mod_base = cm
  modified_base 3: mod_base = cm
  modified_base 18: mod_base = um
  modified_base 19: mod_base = um
  modified_base 20: mod_base = um
cccgcaccttggcgcagcgg

SEQ ID NO: 1442 - RNA, 20 nt, Synthetic construct
  source 1..20: mol_type = other RNA
gggcgaacccgcagccggga

SEQ ID NO: 1443 - RNA, 20 nt, Synthetic construct
  source 1..20: mol_type = other RNA
tcccggctgcgggttcgccc

SEQ ID NO: 1444 - RNA, 20 nt, Synthetic construct
  source 1..20: mol_type = other RNA
caccgcaccgtcccggctgc

SEQ ID NO: 1445 - RNA, 20 nt, Synthetic construct
  source 1..20: mol_type = other RNA
gcaccgcaccgtcccggctg

SEQ ID NO: 1446 - RNA, 20 nt, Synthetic construct
  source 1..20: mol_type = other RNA
gaaacagcaccgcaccgtcc

SEQ ID NO: 1447 - RNA, 20 nt, Synthetic construct
  source 1..20: mol_type = other RNA
ggtgcggtgctgtttcctct

SEQ ID NO: 1448 - RNA, 20 nt, Synthetic construct
  source 1..20: mol_type = other RNA
gtgcggtgctgtttcctctc

SEQ ID NO: 1449 - RNA, 20 nt, Synthetic construct
  source 1..20: mol_type = other RNA
gggggaaactgaggcccgag

SEQ ID NO: 1450 - RNA, 20 nt, Synthetic construct
  source 1..20: mol_type = other RNA
agtttccccccatgtaagag

SEQ ID NO: 1451 - RNA, 20 nt, Synthetic construct
  source 1..20: mol_type = other RNA
cccccatgtaagagaggaag

SEQ ID NO: 1452 - RNA, 20 nt, Synthetic construct
  source 1..20: mol_type = other RNA
cacttcctctcttacatggg

SEQ ID NO: 1453 - RNA, 20 nt, Synthetic construct
  source 1..20: mol_type = other RNA
ccacttcctctcttacatgg

SEQ ID NO: 1454 - RNA, 20 nt, Synthetic construct
  source 1..20: mol_type = other RNA
taagagaggaagtggagtgc

SEQ ID NO: 1455 - RNA, 20 nt, Synthetic construct
  source 1..20: mol_type = other RNA
gtcgccgagggctcttcgct

SEQ ID NO: 1456 - RNA, 20 nt, Synthetic construct
  source 1..20: mol_type = other RNA
cgtgccaagcgaagagccct

SEQ ID NO: 1457 - RNA, 20 nt, Synthetic construct
  source 1..20: mol_type = other RNA
ctcttcgcttggcacgatct

SEQ ID NO: 1458 - RNA, 20 nt, Synthetic construct
  source 1..20: mol_type = other RNA
  modified_base 1..2: mod_base = OTHER; note = phosphorothioate linkage
  modified_base 2..3: mod_base = OTHER; note = phosphorothioate linkage
  modified_base 3..4: mod_base = OTHER; note = phosphorothioate linkage
  modified_base 17..18: mod_base = OTHER; note = phosphorothioate linkage
  modified_base 18..19: mod_base = OTHER; note = phosphorothioate linkage
  modified_base 19..20: mod_base = OTHER; note = phosphorothioate linkage
  modified_base 1: mod_base = um
  modified_base 2: mod_base = cm
  modified_base 3: mod_base = um
  modified_base 18: mod_base = um
  modified_base 19: mod_base = um
  modified_base 20: mod_base = um
tcttcgcttggcacgatctt

SEQ ID NO: 1459 - RNA, 20 nt, Synthetic construct
  source 1..20: mol_type = other RNA
cttcgcttggcacgatcttg

SEQ ID NO: 1460 - RNA, 20 nt, Synthetic construct
  source 1..20: mol_type = other RNA
ggcacgatcttggggactgc

SEQ ID NO: 1461 - RNA, 20 nt, Synthetic construct
  source 1..20: mol_type = other RNA
gatcttggggactgcaggca

SEQ ID NO: 1462 - RNA, 20 nt, Synthetic construct
  source 1..20: mol_type = other RNA
cttggggactgcaggcaagg

SEQ ID NO: 1463 - RNA, 20 nt, Synthetic construct
  source 1..20: mol_type = other RNA
ggactgcaggcaaggcggcg

SEQ ID NO: 1464 - RNA, 20 nt, Synthetic construct
  source 1..20: mol_type = other RNA
gactgcaggcaaggcggcgg

SEQ ID NO: 1465 - RNA, 20 nt, Synthetic construct
  source 1..20: mol_type = other RNA
  modified_base 1..2: mod_base = OTHER; note = phosphorothioate linkage
  modified_base 2..3: mod_base = OTHER; note = phosphorothioate linkage
  modified_base 3..4: mod_base = OTHER; note = phosphorothioate linkage
  modified_base 17..18: mod_base = OTHER; note = phosphorothioate linkage
  modified_base 18..19: mod_base = OTHER; note = phosphorothioate linkage
  modified_base 19..20: mod_base = OTHER; note = phosphorothioate linkage
  modified_base 1: mod_base = um
  modified_base 2: mod_base = gm
  modified_base 3: mod_base = cm
  modified_base 18: mod_base = um
  modified_base 19: mod_base = um
  modified_base 20: mod_base = um
tgcaggcaaggcggcggggg

SEQ ID NO: 1466 - RNA, 20 nt, Synthetic construct
  source 1..20: mol_type = other RNA
ggcaaggcggcgggggagga

SEQ ID NO: 1467 - RNA, 20 nt, Synthetic construct
  source 1..20: mol_type = other RNA
gcaaggcggcgggggaggac

SEQ ID NO: 1468 - RNA, 20 nt, Synthetic construct
  source 1..20: mol_type = other RNA
gtggggagcacggtggagag

SEQ ID NO: 1469 - RNA, 20 nt, Synthetic construct
  source 1..20: mol_type = other RNA
tggggagcacggtggagagc

SEQ ID NO: 1470 - RNA, 20 nt, Synthetic construct
  source 1..20: mol_type = other RNA
ggggagcacggtggagagcg

SEQ ID NO: 1471 - RNA, 20 nt, Synthetic construct
  source 1..20: mol_type = other RNA
  modified_base 1..2: mod_base = OTHER; note = phosphorothioate linkage
  modified_base 2..3: mod_base = OTHER; note = phosphorothioate linkage
  modified_base 3..4: mod_base = OTHER; note = phosphorothioate linkage
  modified_base 17..18: mod_base = OTHER; note = phosphorothioate linkage
  modified_base 18..19: mod_base = OTHER; note = phosphorothioate linkage
  modified_base 19..20: mod_base = OTHER; note = phosphorothioate linkage
  modified_base 1: mod_base = OTHER; note = 2prime-O-methyladenosine
  modified_base 2: mod_base = gm
  modified_base 3: mod_base = cm
  modified_base 18: mod_base = um
  modified_base 19: mod_base = um
  modified_base 20: mod_base = um
agcacggtggagagcgggga

SEQ ID NO: 1472 - RNA, 20 nt, Synthetic construct
  source 1..20: mol_type = other RNA
cggtggagagcggggacggc

SEQ ID NO: 1473 - RNA, 20 nt, Synthetic construct
  source 1..20: mol_type = other RNA
  modified_base 1..2: mod_base = OTHER; note = phosphorothioate linkage
  modified_base 2..3: mod_base = OTHER; note = phosphorothioate linkage
  modified_base 3..4: mod_base = OTHER; note = phosphorothioate linkage
  modified_base 17..18: mod_base = OTHER; note = phosphorothioate linkage
  modified_base 18..19: mod_base = OTHER; note = phosphorothioate linkage
  modified_base 19..20: mod_base = OTHER; note = phosphorothioate linkage
  modified_base 1: mod_base = cm
  modified_base 2: mod_base = gm
  modified_base 3: mod_base = um
  modified_base 18: mod_base = um
  modified_base 19: mod_base = um
  modified_base 20: mod_base = um
cgtgcggctgcgctattcag

SEQ ID NO: 1474 - RNA, 20 nt, Synthetic construct
  source 1..20: mol_type = other RNA
gtgcggctgcgctattcagt

SEQ ID NO: 1475 - RNA, 20 nt, Synthetic construct
  source 1..20: mol_type = other RNA
ggctgcgctattcagtggga

SEQ ID NO: 1476 - RNA, 20 nt, Synthetic construct
  source 1..20: mol_type = other RNA
ctattcagtgggaaggttcg

SEQ ID NO: 1477 - RNA, 20 nt, Synthetic construct
  source 1..20: mol_type = other RNA
tattcagtgggaaggttcgc

SEQ ID NO: 1478 - RNA, 20 nt, Synthetic construct
  source 1..20: mol_type = other RNA
attcagtgggaaggttcgcg

SEQ ID NO: 1479 - RNA, 20 nt, Synthetic construct
  source 1..20: mol_type = other RNA
agtgggaaggttcgcggggt

SEQ ID NO: 1480 - RNA, 20 nt, Synthetic construct
  source 1..20: mol_type = other RNA
gtgggaaggttcgcggggtt

SEQ ID NO: 1481 - RNA, 20 nt, Synthetic construct
  source 1..20: mol_type = other RNA
agggcgagcagagcactgcc

SEQ ID NO: 1482 - RNA, 20 nt, Synthetic construct
  source 1..20: mol_type = other RNA
tttctgcctcgccgcggcac

SEQ ID NO: 1483 - RNA, 20 nt, Synthetic construct
  source 1..20: mol_type = other RNA
ctgcctcgccgcggcacagg

SEQ ID NO: 1484 - RNA, 20 nt, Synthetic construct
  source 1..20: mol_type = other RNA
tgcctcgccgcggcacaggt

SEQ ID NO: 1485 - RNA, 20 nt, Synthetic construct
  source 1..20: mol_type = other RNA
cacccacctgtgccgcggcg

SEQ ID NO: 1486 - RNA, 20 nt, Synthetic construct
  source 1..20: mol_type = other RNA
tccttcacccacctgtgccg

SEQ ID NO: 1487 - RNA, 20 nt, Synthetic construct
  source 1..20: mol_type = other RNA
tgggtgaaggagtgaatgcc

SEQ ID NO: 1488 - DNA, 2001 bp, Synthetic construct
  source 1..2001: mol_type = other DNA
tacctcatggagtcactgtcaacccactggttgcactgtctttgtgcactggctctctggagtgaggtctttgcaaacaaagtggaaagagcatcaactttggactccagcacctagattcagagcaggccatttcactcggaatctgctgtgcatctgcaagggaggatcataaattcgcctttgtttcttcccagtatcgacagcccttccagaaagagcaagcctcatgtcatgccacatgtacaatctgaggccaggagctctctttccccttttcatcctcctgcctggtacacaataggtgtttactggatgcttgtccagttgatttcttgaacatggtgtgtaaaaggaatctttgcaaattgaatcttctggaaagctgagcttgtgcctaccatagaattctgaatgtacctatatgacgtctttgcaaacttaaaacctgaatctttgtagtataaatcccttgaaatgcatgtaggctggacatcaaaagcaagcaatctcttcaaggagcagctagttggtaaggtcagtgtgcagggtgcataaagggcagaggccggagggggtccaggctaagtttagaaggctgccaggttaaggccagtggaaagaattcggtgggcagcgaggagtccacagtaggattgattcagaagtctcactggtcagcaggagacaaggtggacccaggaaacactgaaaaggtgggcccggcagaacttggagtctggcatcccacgcagggtgagaggcgggagaggaggagcccctagggcgccggcctgccttccagcccagttaggatttgggagttttttcttccctctgcgcgtaatctgacgctgtttggggagggcgaggccgaaacctgatcctccagtccgggggttccgttaatgtttaatcagataggatcgtccgatggggctctggtggcgtgatctgcgcgccccaggcgtcaagcacccacaccctagaaggtttccgcagcgacgtcgaggcgctcatggttgcaggcgggcgccgccgttcagttcagggtctgagcctggaggagtgagccaggcagtgagactggctcgggcgggccgggacgcgtcgttgcagcagcggctcccagctcccagccaggattccgcgcgccccttcacgcgccctgctcctgaacttcagctcctgcacagtcctccccaccgcaaggctcaaggcgccgccggcgtggaccgcgcacggcctctaggtctcctcgccaggacagcaacctctcccctggccctcatgggcaccgtcagctccaggcggtcctggtggccgctgccactgctgctgctgctgctgctgctcctgggtcccgcgggcgcccgtgcgcaggaggacgaggacggcgactacgaggagctggtgctagccttgcgttccgaggaggacggcctggccgaagcacccgagcacggaaccacagccaccttccaccgctgcgccaaggtgcgggtgtagggatgggaggccggggcgaacccgcagccgggacggtgcggtgctgtttcctctcgggcctcagtttccccccatgtaagagaggaagtggagtgcaggtcgccgagggctcttcgcttggcacgatcttggggactgcaggcaaggcggcgggggaggacgggtagtggggagcacggtggagagcggggacggccggctctttggggacttgctggggcgtgcggctgcgctattcagtgggaaggttcgcggggttgggagacccggaggccgaggaagggcgagcagagcactgccaggatatcctgcccagatttcccagtttctgcctcgccgcggcacaggtgggtgaaggagtgaatgcctggaacgtactgggaactgcaccaggcacagagaaagcgggcttgccattatagtgggttccgatttggtttggaaaacatgggcagcggagggtggagggcctggagagaaggccctacccga

SEQ ID NO: 1489 - DNA, 1069 bp, Synthetic construct
  source 1..1069: mol_type = other DNA
gcaggagacaaggtggacccaggaaacactgaaaaggtgggcccggcagaacttggagtctggcatcccacgcagggtgagaggcgggagaggaggagcccctagggcgccggcctgccttccagcccagttaggatttgggagttttttcttccctctgcgcgtaatctgacgctgtttggggagggcgaggccgaaacctgatcctccagtccgggggttccgttaatgtttaatcagataggatcgtccgatggggctctggtggcgtgatctgcgcgccccaggcgtcaagcacccacaccctagaaggtttccgcagcgacgtcgaggcgctcatggttgcaggcgggcgccgccgttcagttcagggtctgagcctggaggagtgagccaggcagtgagactggctcgggcgggccgggacgcgtcgttgcagcagcggctcccagctcccagccaggattccgcgcgccccttcacgcgccctgctcctgaacttcagctcctgcacagtcctccccaccgcaaggctcaaggcgccgccggcgtggaccgcgcacggcctctaggtctcctcgccaggacagcaacctctcccctggccctcatgggcaccgtcagctccaggcggtcctggtggccgctgccactgctgctgctgctgctgctgctcctgggtcccgcgggcgcccgtgcgcaggaggacgaggacggcgactacgaggagctggtgctagccttgcgttccgaggaggacggcctggccgaagcacccgagcacggaaccacagccaccttccaccgctgcgccaaggtgcgggtgtagggatgggaggccggggcgaacccgcagccgggacggtgcggtgctgtttcctctcgggcctcagtttccccccatgtaagagaggaagtggagtgcaggtcgccgagggctcttcgcttggcacgatcttggggactgcaggcaaggcggcgggggaggacgggtagtggggagcacggtggagagcggggacggccggctctttggggacttgctggggcgtgcggctgcgctattcag

SEQ ID NO: 1490 - RNA, 20 nt, Synthetic construct
  source 1..20: mol_type = other RNA
cccgcaccttggcgcagcgg

SEQ ID NO: 1491 - RNA, 112 nt, Synthetic construct
  source 1..112: mol_type = other RNA
actgcctggctcactcctccgtttaagagctaagctggaaacagcatagcaagtttaaataaggctagtccgttatcaacttgaaaaagtggcaccgagtcggtgctttttt

SEQ ID NO: 1492 - RNA, 112 nt, Synthetic construct
  source 1..112: mol_type = other RNA
atcgtccgatggggctctgggtttaagagctaagctggaaacagcatagcaagtttaaataaggctagtccgttatcaacttgaaaaagtggcaccgagtcggtgctttttt

SEQ ID NO: 1493 - RNA, 112 nt, Synthetic construct
  source 1..112: mol_type = other RNA
gcggaaaccttctagggtgtgtttaagagctaagctggaaacagcatagcaagtttaaataaggctagtccgttatcaacttgaaaaagtggcaccgagtcggtgctttttt

SEQ ID NO: 1494 - RNA, 112 nt, Synthetic construct
  source 1..112: mol_type = other RNA
cccgcaccttggcgcagcgggtttaagagctaagctggaaacagcatagcaagtttaaataaggctagtccgttatcaacttgaaaaagtggcaccgagtcggtgctttttt

SEQ ID NO: 1495 - protein, 2086 aa, Synthetic construct
MNHDQEFDPPKVYPPVPAEKRKPIRVLSLFDGIATGLLVLKDLGIQVDRYIASEVCEDSITVGMVRHQGKIMYVGDVRSVTQKHIQEWGPFDLVIGGSPCNDLSIVNPARKGLYEGTGRLFFEFYRLLHDARPKEGDDRPFFWLFENVVAMGVSDKRDISRFLESNPVMIDAKEVSAAHRARYFWGNLPGMNRPLASTVNDKLELQECLEHGRIAKFSKVRTITTRSNSIKQGKDQHFPVFMNEKEDILWCTEMERVFGFPVHYTDVSNMSRLARQRLLGRSWSVPVIRHLFAPLKEYFACVSSGNSNANSRGPSFSSGLVPLSLRGSHMNPLEMFETVPVWRRQPVRVLSLFEDIKKELTSLGFLESGSDPGQLKHVVDVTDTVRKDVEEWGPFDLVYGATPPLGHTCDRPPSWYLFQFHRLLQYARPKPGSPRPFFWMFVDNLVLNKEDLDVASRFLEMEPVTIPDVHGGSLQNAVRVWSNIPAIRSRHWALVSEEELSLLAQNKQSSKLAAKWPTKLVKNCFLPLREYFKYFSTELTSSLGGPSSGAPPPSGGSPAGSPTSTEEGTSESATPESGPGTSTEPSEGSAPGSPAGSPTSTEEGTSTEPSEGSAPGTSTEPSEPKKKRKVYMDKKYSIGLAIGTNSVGWAVITDEYKVPSKKFKVLGNTDRHSIKKNLIGALLFDSGETAEATRLKRTARRRYTRRKNRICYLQEIFSNEMAKVDDSFFHRLEESFLVEEDKKHERHPIFGNIVDEVAYHEKYPTIYHLRKKLVDSTDKADLRLIYLALAHMIKFRGHFLIEGDLNPDNSDVDKLFIQLVQTYNQLFEENPINASGVDAKAILSARLSKSRRLENLIAQLPGEKKNGLFGNLIALSLGLTPNFKSNFDLAEDAKLQLSKDTYDDDLDNLLAQIGDQYADLFLAAKNLSDAILLSDILRVNTEITKAPLSASMIKRYDEHHQDLTLLKALVRQQLPEKYKEIFFDQSKNGYAGYIDGGASQEEFYKFIKPILEKMDGTEELLVKLNREDLLRKQRTFDNGSIPHQIHLGELHAILRRQEDFYPFLKDNREKIEKILTFRIPYYVGPLARGNSRFAWMTRKSEETITPWNFEEVVDKGASAQSFIERMTNFDKNLPNEKVLPKHSLLYEYFTVYNELTKVKYVTEGMRKPAFLSGEQKKAIVDLLFKTNRKVTVKQLKEDYFKKIECFDSVEISGVEDRFNASLGTYHDLLKIIKDKDFLDNEENEDILEDIVLTLTLFEDREMIEERLKTYAHLFDDKVMKQLKRRRYTGWGRLSRKLINGIRDKQSGKTILDFLKSDGFANRNFMQLIHDDSLTFKEDIQKAQVSGQGDSLHEHIANLAGSPAIKKGILQTVKVVDELVKVMGRHKPENIVIEMARENQTTQKGQKNSRERMKRIEEGIKELGSQILKEHPVENTQLQNEKLYLYYLQNGRDMYVDQELDINRLSDYDVDAIVPQSFLKDDSIDNKVLTRSDKNRGKSDNVPSEEVVKKMKNYWRQLLNAKLITQRKFDNLTKAERGGLSELDKAGFIKRQLVETRQITKHVAQILDSRMNTKYDENDKLIREVKVITLKSKLVSDFRKDFQFYKVREINNYHHAHDAYLNAVVGTALIKKYPKLESEFVYGDYKVYDVRKMIAKSEQEIGKATAKYFFYSNIMNFFKTEITLANGEIRKRPLIETNGETGEIVWDKGRDFATVRKVLSMPQVNIVKKTEVQTGGFSKESILPKRNSDKLIARKKDWDPKKYGGFDSPTVAYSVLVVAKVEKGKSKKLKSVKELLGITIMERSSFEKNPIDFLEAKGYKEVKKDLIIKLPKYSLFELENGRKRMLASAGELQKGNELALPSKYVNFLYLASHYEKLKGSPEDNEQKQLFVEQHKHYLDEIIEQISEFSKRVILADANLDKVLSAYNKHRDKPIREQAENIIHLFTLTNLGAPAAFKYFDTTIDRKRYTSTKEVLDATLIHQSITGLYETRIDLSQLGGDPKKKRKVSGSETPGTSESATPESTGRTLVTFKDVFVDFTREEWKLLDTAQQIVYRNVMLENYKNLVSLGYQLTKPDVILRLEKGEEP

SEQ ID NO: 1496 - protein, 1384 aa, Synthetic construct
  VARIANT 695..939: note = may be absent
  VARIANT 997..1241: note = may be absent
  VARIANT 658..659: note = may be TR, LR or LK
  VARIANT 686..687: note = may be TR, LR or LK
  VARIANT 960..961: note = may be TR, LR or LK
  VARIANT 988..989: note = may be TR, LR or LK
  VARIANT 1262..1263: note = may be TR, LR or LK
  VARIANT 1290..1291: note = may be TR, LR or LK
MNHDQEFDPPKVYPPVPAEKRKPIRVLSLFDGIATGLLVLKDLGIQVDRYIASEVCEDSITVGMVRHQGKIMYVGDVRSVTQKHIQEWGPFDLVIGGSPCNDLSIVNPARKGLYEGTGRLFFEFYRLLHDARPKEGDDRPFFWLFENVVAMGVSDKRDISRFLESNPVMIDAKEVSAAHRARYFWGNLPGMNRPLASTVNDKLELQECLEHGRIAKFSKVRTITTRSNSIKQGKDQHFPVFMNEKEDILWCTEMERVFGFPVHYTDVSNMSRLARQRLLGRSWSVPVIRHLFAPLKEYFACVSSGNSNANSRGPSFSSGLVPLSLRGSHMNPLEMFETVPVWRRQPVRVLSLFEDIKKELTSLGFLESGSDPGQLKHVVDVTDTVRKDVEEWGPFDLVYGATPPLGHTCDRPPSWYLFQFHRLLQYARPKPGSPRPFFWMFVDNLVLNKEDLDVASRFLEMEPVTIPDVHGGSLQNAVRVWSNIPAIRSRHWALVSEEELSLLAQNKQSSKLAAKWPTKLVKNCFLPLREYFKYFSTELTSSLGGPSSGAPPPSGGSPAGSPTSTEEGTSESATPESGPGTSTEPSEGSAPGSPAGSPTSTEEGTSTEPSEGSAPGTSTEPSEPKKKRKVYSRPGERPFQCRICMRNFSXXXXXXXHXXTHTGEKPFQCRICMRNFSXXXXXXXHXXTHXXXXXXXXXXXXXXXXXXXXXXXXXXXXXXXXXXXXXXXXXXXXXXXXXXXXXXXXXXXXXXXXXXXXXXXXXXXXXXXXXXXXXXXXXXXXXXXXXXXXXXXXXXXXXXXXXXXXXXXXXXXXXXXXXXXXXXXXXXXXXXXXXXXXXXXXXXXXXXXXXXXXXXXXXXXXXXXXXXXXXXXXXXXXXXXXXXXXXXXXXXXXXXXXXXXXXXXXXXXXXXXXXXXXXXXXXXXXXXXXXXXXXXXXXXPFQCRICMRNFSXXXXXXXHXXTHTGEKPFQCRICMRNFSXXXXXXXHXXTHXXXXXXXXXXXXXXXXXXXXXXXXXXXXXXXXXXXXXXXXXXXXXXXXXXXXXXXXXXXXXXXXXXXXXXXXXXXXXXXXXXXXXXXXXXXXXXXXXXXXXXXXXXXXXXXXXXXXXXXXXXXXXXXXXXXXXXXXXXXXXXXXXXXXXXXXXXXXXXXXXXXXXXXXXXXXXXXXXXXXXXXXXXXXXXXXXXXXXXXXXXXXXXXXXXXXXXXXXXXXXXXXXXXXXXXXXXXXXXXXXXXXXXXXXXPFQCRICMRNFSXXXXXXXHXXTHTGEKPFQCRICMRNFSXXXXXXXHXXTHLRGSPKKKRKVSGSETPGTSESATPESTGRTLVTFKDVFVDFTREEWKLLDTAQQIVYRNVMLENYKNLVSLGYQLTKPDVILRLEKGEEP

SEQ ID NO: 1497 - protein, 386 aa, Synthetic construct
MAAIPALDPEAEPSMDVILVGSSELSSSVSPGTGRDLIAYEVKANQRNIEDICICCGSLQVHTQHPLFEGGICAPCKDKFLDALFLYDDDGYQSYCSICCSGETLLICGNPDCTRCYCFECVDSLVGPGTSGKVHAMSNWVCYLCLPSSRSGLLQRRRKWRSQLKAFYDRESENPLEMFETVPVWRRQPVRVLSLFEDIKKELTSLGFLESGSDPGQLKHVVDVTDTVRKDVEEWGPFDLVYGATPPLGHTCDRPPSWYLFQFHRLLQYARPKPGSPRPFFWMFVDNLVLNKEDLDVASRFLEMEPVTIPDVHGGSLQNAVRVWSNIPAIRSRHWALVSEEELSLLAQNKQSSKLAAKWPTKLVKNCFLPLREYFKYFSTELTSSL

SEQ ID NO: 1498 - protein, 2098 aa, Synthetic construct
MPKKKRKVPKKKRKVNHDQEFDPPKVYPPVPAEKRKPIRVLSLFDGIATGLLVLKDLGIQVDRYIASEVCEDSITVGMVRHQGKIMYVGDVRSVTQKHIQEWGPFDLVIGGSPCNDLSIVNPARKGLYEGTGRLFFEFYRLLHDARPKEGDDRPFFWLFENVVAMGVSDKRDISRFLESNPVMIDAKEVSAAHRARYFWGNLPGMNRPLASTVNDKLELQECLEHGRIAKFSKVRTITTRSNSIKQGKDQHFPVFMNEKEDILWCTEMERVFGFPVHYTDVSNMSRLARQRLLGRSWSVPVIRHLFAPLKEYFACVSSGNSNANSRGPSFSSGLVPLSLRGSHNPLEMFETVPVWRRQPVRVLSLFEDIKKELTSLGFLESGSDPGQLKHVVDVTDTVRKDVEEWGPFDLVYGATPPLGHTCDRPPSWYLFQFHRLLQYARPKPGSPRPFFWMFVDNLVLNKEDLDVASRFLEMEPVTIPDVHGGSLQNAVRVWSNIPAIRSRHWALVSEEELSLLAQNKQSSKLAAKWPTKLVKNCFLPLREYFKYFSTELTSSLGGPSSGAPPPSGGSPAGSPTSTEEGTSESATPESGPGTSTEPSEGSAPGSPAGSPTSTEEGTSTEPSEGSAPGTSTEPSEMDKKYSIGLAIGTNSVGWAVITDEYKVPSKKFKVLGNTDRHSIKKNLIGALLFDSGETAEATRLKRTARRRYTRRKNRICYLQEIFSNEMAKVDDSFFHRLEESFLVEEDKKHERHPIFGNIVDEVAYHEKYPTIYHLRKKLVDSTDKADLRLIYLALAHMIKFRGHFLIEGDLNPDNSDVDKLFIQLVQTYNQLFEENPINASGVDAKAILSARLSKSRRLENLIAQLPGEKKNGLFGNLIALSLGLTPNFKSNFDLAEDAKLQLSKDTYDDDLDNLLAQIGDQYADLFLAAKNLSDAILLSDILRVNTEITKAPLSASMIKRYDEHHQDLTLLKALVRQQLPEKYKEIFFDQSKNGYAGYIDGGASQEEFYKFIKPILEKMDGTEELLVKLNREDLLRKQRTFDNGSIPHQIHLGELHAILRRQEDFYPFLKDNREKIEKILTFRIPYYVGPLARGNSRFAWMTRKSEETITPWNFEEVVDKGASAQSFIERMTNFDKNLPNEKVLPKHSLLYEYFTVYNELTKVKYVTEGMRKPAFLSGEQKKAIVDLLFKTNRKVTVKQLKEDYFKKIECFDSVEISGVEDRFNASLGTYHDLLKIIKDKDFLDNEENEDILEDIVLTLTLFEDREMIEERLKTYAHLFDDKVMKQLKRRRYTGWGRLSRKLINGIRDKQSGKTILDFLKSDGFANRNFMQLIHDDSLTFKEDIQKAQVSGQGDSLHEHIANLAGSPAIKKGILQTVKVVDELVKVMGRHKPENIVIEMARENQTTQKGQKNSRERMKRIEEGIKELGSQILKEHPVENTQLQNEKLYLYYLQNGRDMYVDQELDINRLSDYDVDAIVPQSFLKDDSIDNKVLTRSDKNRGKSDNVPSEEVVKKMKNYWRQLLNAKLITQRKFDNLTKAERGGLSELDKAGFIKRQLVETRQITKHVAQILDSRMNTKYDENDKLIREVKVITLKSKLVSDFRKDFQFYKVREINNYHHAHDAYLNAVVGTALIKKYPKLESEFVYGDYKVYDVRKMIAKSEQEIGKATAKYFFYSNIMNFFKTEITLANGEIRKRPLIETNGETGEIVWDKGRDFATVRKVLSMPQVNIVKKTEVQTGGFSKESILPKRNSDKLIARKKDWDPKKYGGFDSPTVAYSVLVVAKVEKGKSKKLKSVKELLGITIMERSSFEKNPIDFLEAKGYKEVKKDLIIKLPKYSLFELENGRKRMLASAGELQKGNELALPSKYVNFLYLASHYEKLKGSPEDNEQKQLFVEQHKHYLDEIIEQISEFSKRVILADANLDKVLSAYNKHRDKPIREQAENIIHLFTLTNLGAPAAFKYFDTTIDRKRYTSTKEVLDATLIHQSITGLYETRIDLSQLGGDSGSETPGTSESATPESTGRTLVTFKDVFVDFTREEWKLLDTAQQIVYRNVMLENYKNLVSLGYQLTKPDVILRLEKGEEPPKKKRKVPKKKRKV

SEQ ID NO: 1499 - DNA, 6294 bp, Synthetic construct
  source 1..6294: mol_type = other DNA
atgccaaaaaagaagagaaaggtaccgaagaaaaaaagaaaggtcaaccatgatcaagaattcgacccacctaaagtctacccacctgtgcccgccgaaaaaaggaaacccataagggtgctgtcactctttgatggcatcgccactggtctcctggttcttaaggatctgggaattcaggtcgatcggtacattgctagcgaggtttgtgaggatagtattacagtgggtatggtgcgccaccagggaaagatcatgtatgttggtgacgttaggagcgtcacccagaaacatatccaggagtggggaccctttgatttggtgatcggaggtagtccctgcaatgacctttccatcgtgaatccagccaggaaagggctgtatgaagggactggtaggctctttttcgagttttatcgcctgcttcacgacgctagacctaaggaaggtgacgataggcctttcttttggctttttgagaacgtcgtggcaatgggagtctccgacaaaagggacatttctcgctttctggaatctaaccccgttatgatcgatgccaaggaagtttctgccgctcacagggcaaggtacttctggggcaatctgcccggaatgaatcgcccactggccagtaccgtgaatgacaaactggagctgcaggagtgcctggagcacggaagaatcgcaaagttttctaaagtcaggaccattaccactcgcagtaactccataaaacagggtaaggaccagcattttcccgtcttcatgaatgaaaaggaagatattctgtggtgcactgaaatggagagagttttcgggtttcccgtgcactataccgatgtttccaacatgtcccgccttgcaagacaaaggcttttgggccgctcttggtctgtgccagtgatccggcacttgtttgctcccctcaaagagtacttcgcttgcgtcagttccggaaattcaaacgctaactctcggggtccatctttctccagtggtctcgtgccactgtctctccggggctctcacaatcccctggagatgtttgagacagtgccagtctggcggaggcagcccgttcgcgttctctctctgttcgaagatattaaaaaggaactcacctcccttgggttcctggagagcgggagcgaccccggacagcttaagcacgtggtcgacgtgactgacaccgtccgcaaagacgtggaggaatggggccccttcgatctggtctatggggcaacccctccccttgggcatacatgtgatcggcctccatcctggtacctgttccagtttcacagactcctgcagtatgccaggccaaagccagggagcccaaggccctttttctggatgttcgtcgacaacctggtcctgaacaaagaagatctcgacgttgctagtcgctttctcgaaatggagcccgtgaccattcccgacgtgcatggcggttccctccagaatgcagtcagggtttggagcaatatccctgccatcaggtcaaggcactgggcactggtttcagaggaagagctgtccctccttgcccagaacaagcagtcatccaaactggcagccaagtggccaactaagctggtcaagaactgctttcttcccctcagagaatattttaagtatttcagtactgaactgactagcagtctgggagggccgagctctggcgcacccccaccaagtggagggtctcctgccgggtccccaacatctactgaagaaggcaccagcgaatccgcaacgcccgagtcaggccctggtacctccacagaaccatctgaaggtagtgcgcctggttccccagctggaagccctacttccaccgaagaaggcacgtcaaccgaaccaagtgaaggatctgcccctgggaccagcactgaaccatctgagatggacaagaagtacagcatcggcctggccatcggcaccaactctgtgggctgggccgtgatcaccgacgagtacaaggtgcccagcaagaaattcaaggtgctgggcaacaccgaccggcacagcatcaagaagaacctgatcggcgccctgctgttcgacagcggagaaacagccgaggccacccggctgaagagaaccgccagaagaagatacaccagacggaagaaccggatctgctatctgcaagagatcttcagcaacgagatggccaaggtggacgacagcttcttccacagactggaagagtccttcctggtggaagaggataagaagcacgagcggcaccccatcttcggcaacatcgtggacgaggtggcctaccacgagaagtaccccaccatctaccacctgagaaagaaactggtggacagcaccgacaaggccgacctgcggctgatctatctggccctggcccacatgatcaagttccggggccacttcctgatcgagggcgacctgaaccccgacaacagcgacgtggacaagctgttcatccagctggtgcagacctacaaccagctgttcgaggaaaaccccatcaacgccagcggcgtggacgccaaggccatcctgtctgccagactgagcaagagcagacggctggaaaatctgatcgcccagctgcccggcgagaagaagaatggcctgttcggcaacctgattgccctgagcctgggcctgacccccaacttcaagagcaacttcgacctggccgaggatgccaaactgcagctgagcaaggacacctacgacgacgacctggacaacctgctggcccagatcggcgaccagtacgccgacctgtttctggccgccaagaacctgtccgacgccatcctgctgagcgacatcctgagagtgaacaccgagatcaccaaggcccccctgagcgcctctatgatcaagagatacgacgagcaccaccaggacctgaccctgctgaaagctctcgtgcggcagcagctgcctgagaagtacaaagagattttcttcgaccagagcaagaacggctacgccggctacatcgatggcggagccagccaggaagagttctacaagttcatcaagcccatcctggaaaagatggacggcaccgaggaactgctcgtgaagctgaacagagaggacctgctgcggaagcagcggaccttcgacaacggcagcatcccccaccagatccacctgggagagctgcacgccattctgcggcggcaggaagatttttacccattcctgaaggacaaccgggaaaagatcgagaagatcctgaccttccgcatcccctactacgtgggccctctggccaggggaaacagcagattcgcctggatgaccagaaagagcgaggaaaccatcaccccctggaacttcgaggaagtggtggacaagggcgccagcgcccagagcttcatcgagcggatgaccaacttcgataagaacctgcccaacgagaaggtgctgcccaagcacagcctgctgtacgagtacttcaccgtgtacaacgagctgaccaaagtgaaatacgtgaccgagggaatgagaaagcccgccttcctgagcggcgagcagaaaaaagccatcgtggacctgctgttcaagaccaaccggaaagtgaccgtgaagcagctgaaagaggactacttcaagaaaatcgagtgcttcgactccgtggaaatctccggcgtggaagatcggttcaacgcctccctgggcacataccacgatctgctgaaaattatcaaggacaaggacttcctggacaatgaggaaaacgaggacattctggaagatatcgtgctgaccctgacactgtttgaggacagagagatgatcgaggaacggctgaaaacctatgcccacctgttcgacgacaaagtgatgaagcagctgaagcggcggagatacaccggctggggcaggctgagccggaagctgatcaacggcatccgggacaagcagtccggcaagacaatcctggatttcctgaagtccgacggcttcgccaacagaaacttcatgcagctgatccacgacgacagcctgacctttaaagaggacatccagaaagcccaggtgtccggccagggcgatagcctgcacgagcacattgccaatctggccggcagccccgccattaagaagggcatcctgcagacagtgaaggtggtggacgagctcgtgaaagtgatgggccggcacaagcccgagaacatcgtgatcgaaatggccagagagaaccagaccacccagaagggacagaagaacagccgcgagagaatgaagcggatcgaagagggcatcaaagagctgggcagccagatcctgaaagaacaccccgtggaaaacacccagctgcagaacgagaagctgtacctgtactacctgcagaatgggcgggatatgtacgtggaccaggaactggacatcaaccggctgtccgactacgatgtggacgctatcgtgcctcagagctttctgaaggacgactccatcgataacaaagtgctgactcggagcgacaagaaccggggcaagagcgacaacgtgccctccgaagaggtcgtgaagaagatgaagaactactggcgccagctgctgaatgccaagctgattacccagaggaagttcgacaatctgaccaaggccgagagaggcggcctgagcgaactggataaggccggcttcatcaagagacagctggtggaaacccggcagatcacaaagcacgtggcacagatcctggactcccggatgaacactaagtacgacgagaacgacaaactgatccgggaagtgaaagtgatcaccctgaagtccaagctggtgtccgatttccggaaggatttccagttttacaaagtgcgcgagatcaacaactaccaccacgcccacgacgcctacctgaacgccgtcgtgggaaccgccctgatcaaaaagtaccctaagctggaaagcgagttcgtgtacggcgactacaaggtgtacgacgtgcggaagatgatcgccaagagcgagcaggaaatcggcaaggctaccgccaagtacttcttctacagcaacatcatgaactttttcaagaccgagattaccctggccaacggcgagatccggaagcggcctctgatcgagacaaacggcgaaacaggcgagatcgtgtgggataagggccgggactttgccaccgtgcggaaagtgctgtctatgccccaagtgaatatcgtgaaaaagaccgaggtgcagacaggcggcttcagcaaagagtctatcctgcccaagaggaacagcgacaagctgatcgccagaaagaaggactgggaccctaagaagtacggcggcttcgacagccccaccgtggcctattctgtgctggtggtggccaaagtggaaaagggcaagtccaagaaactgaagagtgtgaaagagctgctggggatcaccatcatggaaagaagcagcttcgagaagaatcccatcgactttctggaagccaagggctacaaagaagtgaaaaaggacctgatcatcaagctgcctaagtactccctgttcgagctggaaaacggccggaagagaatgctggcctctgccggcgaactgcagaagggaaacgaactggccctgccctccaaatatgtgaacttcctgtacctggccagccactatgagaagctgaagggctcccccgaggataatgagcagaaacagctgtttgtggaacagcacaaacactacctggacgagatcatcgagcagatcagcgagttctccaagagagtgatcctggccgacgctaatctggacaaggtgctgagcgcctacaacaagcacagagacaagcctatcagagagcaggccgagaatatcatccacctgtttaccctgaccaatctgggagcccctgccgccttcaagtactttgacaccaccatcgaccggaagaggtacaccagcaccaaagaggtgctggacgccaccctgatccaccagagcatcaccggcctgtacgagacacggatcgacctgtctcagctgggaggcgacagcggaagtgagaccccaggtacatccgaatcagcaacgcctgaaagcaccggtcggacactggtgaccttcaaggatgtatttgtggacttcaccagggaggagtggaagctgctggacactgctcagcagatcgtgtacagaaatgtgatgctggagaactataagaacctggtttccttgggttatcagcttactaagccagatgtgatcctccggttggagaagggagaagagcccccaaaaaagaagagaaaggtaccgaagaaaaaaagaaaggtc

SEQ ID NO: 1500 - protein, 2084 aa, Synthetic construct
MNHDQEFDPPKVYPPVPAEKRKPIRVLSLFDGIATGLLVLKDLGIQVDRYIASEVCEDSITVGMVRHQGKIMYVGDVRSVTQKHIQEWGPFDLVIGGSPCNDLSIVNPARKGLYEGTGRLFFEFYRLLHDARPKEGDDRPFFWLFENVVAMGVSDKRDISRFLESNPVMIDAKEVSAAHRARYFWGNLPGMNRPLASTVNDKLELQECLEHGRIAKFSKVRTITTRSNSIKQGKDQHFPVFMNEKEDILWCTEMERVFGFPVHYTDVSNMSRLARQRLLGRSWSVPVIRHLFAPLKEYFACVSSGNSNANSRGPSFSSGLVPLSLRGSHNPLEMFETVPVWRRQPVRVLSLFEDIKKELTSLGFLESGSDPGQLKHVVDVTDTVRKDVEEWGPFDLVYGATPPLGHTCDRPPSWYLFQFHRLLQYARPKPGSPRPFFWMFVDNLVLNKEDLDVASRFLEMEPVTIPDVHGGSLQNAVRVWSNIPAIRSRHWALVSEEELSLLAQNKQSSKLAAKWPTKLVKNCFLPLREYFKYFSTELTSSLGGPSSGAPPPSGGSPAGSPTSTEEGTSESATPESGPGTSTEPSEGSAPGSPAGSPTSTEEGTSTEPSEGSAPGTSTEPSEPKKKRKVMDKKYSIGLAIGTNSVGWAVITDEYKVPSKKFKVLGNTDRHSIKKNLIGALLFDSGETAEATRLKRTARRRYTRRKNRICYLQEIFSNEMAKVDDSFFHRLEESFLVEEDKKHERHPIFGNIVDEVAYHEKYPTIYHLRKKLVDSTDKADLRLIYLALAHMIKFRGHFLIEGDLNPDNSDVDKLFIQLVQTYNQLFEENPINASGVDAKAILSARLSKSRRLENLIAQLPGEKKNGLFGNLIALSLGLTPNFKSNFDLAEDAKLQLSKDTYDDDLDNLLAQIGDQYADLFLAAKNLSDAILLSDILRVNTEITKAPLSASMIKRYDEHHQDLTLLKALVRQQLPEKYKEIFFDQSKNGYAGYIDGGASQEEFYKFIKPILEKMDGTEELLVKLNREDLLRKQRTFDNGSIPHQIHLGELHAILRRQEDFYPFLKDNREKIEKILTFRIPYYVGPLARGNSRFAWMTRKSEETITPWNFEEVVDKGASAQSFIERMTNFDKNLPNEKVLPKHSLLYEYFTVYNELTKVKYVTEGMRKPAFLSGEQKKAIVDLLFKTNRKVTVKQLKEDYFKKIECFDSVEISGVEDRFNASLGTYHDLLKIIKDKDFLDNEENEDILEDIVLTLTLFEDREMIEERLKTYAHLFDDKVMKQLKRRRYTGWGRLSRKLINGIRDKQSGKTILDFLKSDGFANRNFMQLIHDDSLTFKEDIQKAQVSGQGDSLHEHIANLAGSPAIKKGILQTVKVVDELVKVMGRHKPENIVIEMARENQTTQKGQKNSRERMKRIEEGIKELGSQILKEHPVENTQLQNEKLYLYYLQNGRDMYVDQELDINRLSDYDVDAIVPQSFLKDDSIDNKVLTRSDKNRGKSDNVPSEEVVKKMKNYWRQLLNAKLITQRKFDNLTKAERGGLSELDKAGFIKRQLVETRQITKHVAQILDSRMNTKYDENDKLIREVKVITLKSKLVSDFRKDFQFYKVREINNYHHAHDAYLNAVVGTALIKKYPKLESEFVYGDYKVYDVRKMIAKSEQEIGKATAKYFFYSNIMNFFKTEITLANGEIRKRPLIETNGETGEIVWDKGRDFATVRKVLSMPQVNIVKKTEVQTGGFSKESILPKRNSDKLIARKKDWDPKKYGGFDSPTVAYSVLVVAKVEKGKSKKLKSVKELLGITIMERSSFEKNPIDFLEAKGYKEVKKDLIIKLPKYSLFELENGRKRMLASAGELQKGNELALPSKYVNFLYLASHYEKLKGSPEDNEQKQLFVEQHKHYLDEIIEQISEFSKRVILADANLDKVLSAYNKHRDKPIREQAENIIHLFTLTNLGAPAAFKYFDTTIDRKRYTSTKEVLDATLIHQSITGLYETRIDLSQLGGDPKKKRKVSGSETPGTSESATPESTGRTLVTFKDVFVDFTREEWKLLDTAQQIVYRNVMLENYKNLVSLGYQLTKPDVILRLEKGEEP

SEQ ID NO: 1501 - DNA, 6252 bp, Synthetic construct
  source 1..6252: mol_type = other DNA
atgaaccacgaccaggaatttgaccctccaaaggtttacccacctgtcccagctgagaagaggaagcccatccgggtgctgtctctctttgatggaatcgctacagggctcctggtgctgaaggacttgggcattcaggtggaccgctacattgcctcggaggtgtgtgaggactccatcacggtgggcatggtgcggcaccaggggaagatcatgtacgtcggggacgtccgcagcgtcacacagaagcatatccaggagtggggcccattcgatctggtgattgggggcagtccctgcaatgacctctccatcgtcaaccctgctcgcaagggcctctacgagggcactggccggctcttctttgagttctaccgcctcctgcatgatgcgcggcccaaggagggagatgatcgccccttcttctggctctttgagaatgtggtggccatgggcgttagtgacaagagggacatctcgcgatttctcgagtccaaccctgtgatgattgatgccaaagaagtgtcagctgcacacagggcccgctacttctggggtaaccttcccggtatgaacaggccgttggcatccactgtgaatgataagctggagctgcaggagtgtctggagcatggcaggatagccaagttcagcaaagtgaggaccattactacgaggtcaaactccataaagcagggcaaagaccagcattttcctgtcttcatgaatgagaaagaggacatcttatggtgcactgaaatggaaagggtatttggtttcccagtccactatactgacgtctccaacatgagccgcttggcgaggcagagactgctgggccggtcatggagcgtgccagtcatccgccacctcttcgctccgctgaaggagtattttgcgtgtgtgtctagcggcaatagtaacgctaacagccgcgggccgagcttcagcagcggcctggtgccgttaagcttgcgcggcagccataatccccttgagatgttcgaaaccgtgcctgtgtggaggagacagccagtccgggtgctgtccctttttgaagacatcaagaaagagctgacgagtttgggctttttggaaagtggttctgacccgggacaactgaagcatgtggttgatgtcacagacacagtgaggaaggatgtggaggagtggggacccttcgatcttgtgtacggcgccacacctcccctgggccacacctgtgaccgtcctcccagctggtacctgttccagttccaccggctcctgcagtacgcacggcccaagccaggcagccccaggcccttcttctggatgttcgtggacaatctggtgctgaacaaggaagacctggacgtcgcatctcgcttcctggagatggagccagtcaccatcccagatgtccacggcggatccttgcagaatgctgtccgcgtgtggagcaacatcccagccataaggagcaggcactgggctctggtttcggaagaagaattgtccctgctggcccagaacaagcagagctcgaagctcgcggccaagtggcccaccaagctggtgaagaactgctttctccccctaagagaatatttcaagtatttttcaacagaactcacttcctctttaggagggccgagctctggcgcacccccaccaagtggagggtctcctgccgggtccccaacatctactgaagaaggcaccagcgaatccgcaacgcccgagtcaggccctggtacctccacagaaccatctgaaggtagtgcgcctggttccccagctggaagccctacttccaccgaagaaggcacgtcaaccgaaccaagtgaaggatctgcccctgggaccagcactgaaccatctgagccaaaaaagaagagaaaggtaatggacaagaagtacagcatcggcctggccatcggcaccaactctgtgggctgggccgtgatcaccgacgagtacaaggtgcccagcaagaaattcaaggtgctgggcaacaccgaccggcacagcatcaagaagaacctgatcggcgccctgctgttcgacagcggagaaacagccgaggccacccggctgaagagaaccgccagaagaagatacaccagacggaagaaccggatctgctatctgcaagagatcttcagcaacgagatggccaaggtggacgacagcttcttccacagactggaagagtccttcctggtggaagaggataagaagcacgagcggcaccccatcttcggcaacatcgtggacgaggtggcctaccacgagaagtaccccaccatctaccacctgagaaagaaactggtggacagcaccgacaaggccgacctgcggctgatctatctggccctggcccacatgatcaagttccggggccacttcctgatcgagggcgacctgaaccccgacaacagcgacgtggacaagctgttcatccagctggtgcagacctacaaccagctgttcgaggaaaaccccatcaacgccagcggcgtggacgccaaggccatcctgtctgccagactgagcaagagcagacggctggaaaatctgatcgcccagctgcccggcgagaagaagaatggcctgttcggcaacctgattgccctgagcctgggcctgacccccaacttcaagagcaacttcgacctggccgaggatgccaaactgcagctgagcaaggacacctacgacgacgacctggacaacctgctggcccagatcggcgaccagtacgccgacctgtttctggccgccaagaacctgtccgacgccatcctgctgagcgacatcctgagagtgaacaccgagatcaccaaggcccccctgagcgcctctatgatcaagagatacgacgagcaccaccaggacctgaccctgctgaaagctctcgtgcggcagcagctgcctgagaagtacaaagagattttcttcgaccagagcaagaacggctacgccggctacatcgatggcggagccagccaggaagagttctacaagttcatcaagcccatcctggaaaagatggacggcaccgaggaactgctcgtgaagctgaacagagaggacctgctgcggaagcagcggaccttcgacaacggcagcatcccccaccagatccacctgggagagctgcacgccattctgcggcggcaggaagatttttacccattcctgaaggacaaccgggaaaagatcgagaagatcctgaccttccgcatcccctactacgtgggccctctggccaggggaaacagcagattcgcctggatgaccagaaagagcgaggaaaccatcaccccctggaacttcgaggaagtggtggacaagggcgccagcgcccagagcttcatcgagcggatgaccaacttcgataagaacctgcccaacgagaaggtgctgcccaagcacagcctgctgtacgagtacttcaccgtgtacaacgagctgaccaaagtgaaatacgtgaccgagggaatgagaaagcccgccttcctgagcggcgagcagaaaaaagccatcgtggacctgctgttcaagaccaaccggaaagtgaccgtgaagcagctgaaagaggactacttcaagaaaatcgagtgcttcgactccgtggaaatctccggcgtggaagatcggttcaacgcctccctgggcacataccacgatctgctgaaaattatcaaggacaaggacttcctggacaatgaggaaaacgaggacattctggaagatatcgtgctgaccctgacactgtttgaggacagagagatgatcgaggaacggctgaaaacctatgcccacctgttcgacgacaaagtgatgaagcagctgaagcggcggagatacaccggctggggcaggctgagccggaagctgatcaacggcatccgggacaagcagtccggcaagacaatcctggatttcctgaagtccgacggcttcgccaacagaaacttcatgcagctgatccacgacgacagcctgacctttaaagaggacatccagaaagcccaggtgtccggccagggcgatagcctgcacgagcacattgccaatctggccggcagccccgccattaagaagggcatcctgcagacagtgaaggtggtggacgagctcgtgaaagtgatgggccggcacaagcccgagaacatcgtgatcgaaatggccagagagaaccagaccacccagaagggacagaagaacagccgcgagagaatgaagcggatcgaagagggcatcaaagagctgggcagccagatcctgaaagaacaccccgtggaaaacacccagctgcagaacgagaagctgtacctgtactacctgcagaatgggcgggatatgtacgtggaccaggaactggacatcaaccggctgtccgactacgatgtggacgctatcgtgcctcagagctttctgaaggacgactccatcgataacaaagtgctgactcggagcgacaagaaccggggcaagagcgacaacgtgccctccgaagaggtcgtgaagaagatgaagaactactggcgccagctgctgaatgccaagctgattacccagaggaagttcgacaatctgaccaaggccgagagaggcggcctgagcgaactggataaggccggcttcatcaagagacagctggtggaaacccggcagatcacaaagcacgtggcacagatcctggactcccggatgaacactaagtacgacgagaacgacaaactgatccgggaagtgaaagtgatcaccctgaagtccaagctggtgtccgatttccggaaggatttccagttttacaaagtgcgcgagatcaacaactaccaccacgcccacgacgcctacctgaacgccgtcgtgggaaccgccctgatcaaaaagtaccctaagctggaaagcgagttcgtgtacggcgactacaaggtgtacgacgtgcggaagatgatcgccaagagcgagcaggaaatcggcaaggctaccgccaagtacttcttctacagcaacatcatgaactttttcaagaccgagattaccctggccaacggcgagatccggaagcggcctctgatcgagacaaacggcgaaacaggcgagatcgtgtgggataagggccgggactttgccaccgtgcggaaagtgctgtctatgccccaagtgaatatcgtgaaaaagaccgaggtgcagacaggcggcttcagcaaagagtctatcctgcccaagaggaacagcgacaagctgatcgccagaaagaaggactgggaccctaagaagtacggcggcttcgacagccccaccgtggcctattctgtgctggtggtggccaaagtggaaaagggcaagtccaagaaactgaagagtgtgaaagagctgctggggatcaccatcatggaaagaagcagcttcgagaagaatcccatcgactttctggaagccaagggctacaaagaagtgaaaaaggacctgatcatcaagctgcctaagtactccctgttcgagctggaaaacggccggaagagaatgctggcctctgccggcgaactgcagaagggaaacgaactggccctgccctccaaatatgtgaacttcctgtacctggccagccactatgagaagctgaagggctcccccgaggataatgagcagaaacagctgtttgtggaacagcacaaacactacctggacgagatcatcgagcagatcagcgagttctccaagagagtgatcctggccgacgctaatctggacaaggtgctgagcgcctacaacaagcacagagacaagcctatcagagagcaggccgagaatatcatccacctgtttaccctgaccaatctgggagcccctgccgccttcaagtactttgacaccaccatcgaccggaagaggtacaccagcaccaaagaggtgctggacgccaccctgatccaccagagcatcaccggcctgtacgagacacggatcgacctgtctcagctgggaggcgacccaaaaaagaagagaaaggtaagcggaagtgagaccccaggtacatccgaatcagcaacgcctgaaagcaccggtcggacactggtgaccttcaaggatgtatttgtggacttcaccagggaggagtggaagctgctggacactgctcagcagatcgtgtacagaaatgtgatgctggagaactataagaacctggtttccttgggttatcagcttactaagccagatgtgatcctccggttggagaagggagaagagccc

SEQ ID NO: 1502 - protein, 2219 aa, Synthetic construct
MNHDQEFDPPKVYPPVPAEKRKPIRVLSLFDGIATGLLVLKDLGIQVDRYIASEVCEDSITVGMVRHQGKIMYVGDVRSVTQKHIQEWGPFDLVIGGSPCNDLSIVNPARKGLYEGTGRLFFEFYRLLHDARPKEGDDRPFFWLFENVVAMGVSDKRDISRFLESNPVMIDAKEVSAAHRARYFWGNLPGMNRPLASTVNDKLELQECLEHGRIAKFSKVRTITTRSNSIKQGKDQHFPVFMNEKEDILWCTEMERVFGFPVHYTDVSNMSRLARQRLLGRSWSVPVIRHLFAPLKEYFACVSSGNSNANSRGPSFSSGLVPLSLRGSHMEVKVNRRSIEDICLCCGTLQVYTRHPLFEGGLCAPCKDKFLESLFLYDDDGHQSYCTICCSGGTLFICESPDCTRCYCFECVDILVGPGTSERINAMACWVCFLCLPFSRSGLLQRRKRWRHQLKAFHDQEGAGPMEIYKTVSAWKRQPVRVLSLFRNIDKVLKSLGFLESGSGSGGGTLKYVEDVTNVVRRDVEKWGPFDLVYGSTQPLGSSCDRCPGWYMFQFHRILQYALPRQESQRPFFWIFMDNLLLTEDDQETTTRFLQTEAVTLQDVRGRDYQNAMRVWSNIPGLKSKHAPLTPKEEEYLQAQVRSRSKLDAPKVDLLVKNCLLPLREYFKYFSQNSLPLGGPSSGAPPPSGGSPAGSPTSTEEGTSESATPESGPGTSTEPSEGSAPGSPAGSPTSTEEGTSTEPSEGSAPGTSTEPSEPKKKRKVMDKKYSIGLAIGTNSVGWAVITDEYKVPSKKFKVLGNTDRHSIKKNLIGALLFDSGETAEATRLKRTARRRYTRRKNRICYLQEIFSNEMAKVDDSFFHRLEESFLVEEDKKHERHPIFGNIVDEVAYHEKYPTIYHLRKKLVDSTDKADLRLIYLALAHMIKFRGHFLIEGDLNPDNSDVDKLFIQLVQTYNQLFEENPINASGVDAKAILSARLSKSRRLENLIAQLPGEKKNGLFGNLIALSLGLTPNFKSNFDLAEDAKLQLSKDTYDDDLDNLLAQIGDQYADLFLAAKNLSDAILLSDILRVNTEITKAPLSASMIKRYDEHHQDLTLLKALVRQQLPEKYKEIFFDQSKNGYAGYIDGGASQEEFYKFIKPILEKMDGTEELLVKLNREDLLRKQRTFDNGSIPHQIHLGELHAILRRQEDFYPFLKDNREKIEKILTFRIPYYVGPLARGNSRFAWMTRKSEETITPWNFEEVVDKGASAQSFIERMTNFDKNLPNEKVLPKHSLLYEYFTVYNELTKVKYVTEGMRKPAFLSGEQKKAIVDLLFKTNRKVTVKQLKEDYFKKIECFDSVEISGVEDRFNASLGTYHDLLKIIKDKDFLDNEENEDILEDIVLTLTLFEDREMIEERLKTYAHLFDDKVMKQLKRRRYTGWGRLSRKLINGIRDKQSGKTILDFLKSDGFANRNFMQLIHDDSLTFKEDIQKAQVSGQGDSLHEHIANLAGSPAIKKGILQTVKVVDELVKVMGRHKPENIVIEMARENQTTQKGQKNSRERMKRIEEGIKELGSQILKEHPVENTQLQNEKLYLYYLQNGRDMYVDQELDINRLSDYDVDAIVPQSFLKDDSIDNKVLTRSDKNRGKSDNVPSEEVVKKMKNYWRQLLNAKLITQRKFDNLTKAERGGLSELDKAGFIKRQLVETRQITKHVAQILDSRMNTKYDENDKLIREVKVITLKSKLVSDFRKDFQFYKVREINNYHHAHDAYLNAVVGTALIKKYPKLESEFVYGDYKVYDVRKMIAKSEQEIGKATAKYFFYSNIMNFFKTEITLANGEIRKRPLIETNGETGEIVWDKGRDFATVRKVLSMPQVNIVKKTEVQTGGFSKESILPKRNSDKLIARKKDWDPKKYGGFDSPTVAYSVLVVAKVEKGKSKKLKSVKELLGITIMERSSFEKNPIDFLEAKGYKEVKKDLIIKLPKYSLFELENGRKRMLASAGELQKGNELALPSKYVNFLYLASHYEKLKGSPEDNEQKQLFVEQHKHYLDEIIEQISEFSKRVILADANLDKVLSAYNKHRDKPIREQAENIIHLFTLTNLGAPAAFKYFDTTIDRKRYTSTKEVLDATLIHQSITGLYETRIDLSQLGGDPKKKRKVSGSETPGTSESATPESTGRTLVTFKDVFVDFTREEWKLLDTAQQIVYRNVMLENYKNLVSLGYQLTKPDVILRLEKGEEP

SEQ ID NO: 1503 - DNA, 6657 bp, Synthetic construct
  source 1..6657: mol_type = other DNA
atgaaccatgaccaggaatttgaccccccaaaggtttacccacctgtgccagctgagaagaggaagcccatccgcgtgctgtctctctttgatgggattgctacagggctcctggtgctgaaggacctgggcatccaagtggaccgctacattgcctccgaggtgtgtgaggactccatcacggtgggcatggtgcggcaccagggaaagatcatgtacgtcggggacgtccgcagcgtcacacagaagcatatccaggagtggggcccattcgacctggtgattggaggcagtccctgcaatgacctctccattgtcaaccctgcccgcaagggactttatgagggtactggccgcctcttctttgagttctaccgcctcctgcatgatgcgcggcccaaggagggagatgatcgccccttcttctggctctttgagaatgtggtggccatgggcgttagtgacaagagggacatctcgcgatttcttgagtctaaccccgtgatgattgacgccaaagaagtgtctgctgcacacagggcccgttacttctggggtaaccttcctggcatgaacaggcctttggcatccactgtgaatgataagctggagctgcaagagtgtctggagcacggcagaatagccaagttcagcaaagtgaggaccattaccaccaggtcaaactctataaagcagggcaaagaccagcatttccccgtcttcatgaacgagaaggaggacatcctgtggtgcactgaaatggaaagggtgtttggcttccccgtccactacacagacgtctccaacatgagccgcttggcgaggcagagactgctgggccgatcgtggagcgtgccggtcatccgccacctcttcgctccgctgaaggaatattttgcttgtgtgtctagcggcaatagtaacgctaacagccgcgggccgagcttcagcagcggcctggtgccgttaagcttgcgcggcagccatatggaagtcaaagtgaaccgacggagcattgaagacatctgcctctgctgtggaactctccaggtgtacactcggcaccccttgtttgagggagggttatgtgccccatgtaaggataagttcctggagtccctcttcctgtatgatgatgatggacaccagagttactgcaccatctgctgttccgggggtaccctgttcatctgtgagagccccgactgtaccagatgctactgtttcgagtgtgtggacatcctggtgggccccgggacctcagagaggatcaatgccatggcctgctgggtttgcttcctgtgcctgcccttctcacggagtggactgctgcagaggcgcaagaggtggcggcaccagctgaaggccttccatgatcaagagggagcgggccctatggagatatacaagacagtgtctgcatggaagagacagccagtgcgggtactgagcctcttcagaaacatcgacaaggtactaaagagtttgggcttcttggaaagcggttctggttctgggggaggaacgctgaagtacgtggaagatgtcacaaatgtcgtgaggagagacgtggagaaatggggcccctttgacctggtgtacggctcgacgcagcccctaggcagctcttgtgatcgctgtcccggctggtacatgttccagttccaccggatcctgcagtatgcgctgcctcgccaggagagtcagcggcccttcttctggatattcatggacaatctgctgctgactgaggatgaccaagagacaactacccgcttccttcagacagaggctgtgaccctccaggatgtccgtggcagagactaccagaatgctatgcgggtgtggagcaacattccagggctgaagagcaagcatgcgcccctgaccccaaaggaagaagagtatctgcaagcccaagtcagaagcaggagcaagctggacgccccgaaagttgacctcctggtgaagaactgccttctcccgctgagagagtacttcaagtatttttctcaaaactcacttcctcttggagggccgagctctggcgcacccccaccaagtggagggtctcctgccgggtccccaacatctactgaagaaggcaccagcgaatccgcaacgcccgagtcaggccctggtacctccacagaaccatctgaaggtagtgcgcctggttccccagctggaagccctacttccaccgaagaaggcacgtcaaccgaaccaagtgaaggatctgcccctgggaccagcactgaaccatctgagccaaaaaagaagagaaaggtaatggacaagaagtacagcatcggcctggccatcggcaccaactctgtgggctgggccgtgatcaccgacgagtacaaggtgcccagcaagaaattcaaggtgctgggcaacaccgaccggcacagcatcaagaagaacctgatcggcgccctgctgttcgacagcggagaaacagccgaggccacccggctgaagagaaccgccagaagaagatacaccagacggaagaaccggatctgctatctgcaagagatcttcagcaacgagatggccaaggtggacgacagcttcttccacagactggaagagtccttcctggtggaagaggataagaagcacgagcggcaccccatcttcggcaacatcgtggacgaggtggcctaccacgagaagtaccccaccatctaccacctgagaaagaaactggtggacagcaccgacaaggccgacctgcggctgatctatctggccctggcccacatgatcaagttccggggccacttcctgatcgagggcgacctgaaccccgacaacagcgacgtggacaagctgttcatccagctggtgcagacctacaaccagctgttcgaggaaaaccccatcaacgccagcggcgtggacgccaaggccatcctgtctgccagactgagcaagagcagacggctggaaaatctgatcgcccagctgcccggcgagaagaagaatggcctgttcggcaacctgattgccctgagcctgggcctgacccccaacttcaagagcaacttcgacctggccgaggatgccaaactgcagctgagcaaggacacctacgacgacgacctggacaacctgctggcccagatcggcgaccagtacgccgacctgtttctggccgccaagaacctgtccgacgccatcctgctgagcgacatcctgagagtgaacaccgagatcaccaaggcccccctgagcgcctctatgatcaagagatacgacgagcaccaccaggacctgaccctgctgaaagctctcgtgcggcagcagctgcctgagaagtacaaagagattttcttcgaccagagcaagaacggctacgccggctacatcgatggcggagccagccaggaagagttctacaagttcatcaagcccatcctggaaaagatggacggcaccgaggaactgctcgtgaagctgaacagagaggacctgctgcggaagcagcggaccttcgacaacggcagcatcccccaccagatccacctgggagagctgcacgccattctgcggcggcaggaagatttttacccattcctgaaggacaaccgggaaaagatcgagaagatcctgaccttccgcatcccctactacgtgggccctctggccaggggaaacagcagattcgcctggatgaccagaaagagcgaggaaaccatcaccccctggaacttcgaggaagtggtggacaagggcgccagcgcccagagcttcatcgagcggatgaccaacttcgataagaacctgcccaacgagaaggtgctgcccaagcacagcctgctgtacgagtacttcaccgtgtacaacgagctgaccaaagtgaaatacgtgaccgagggaatgagaaagcccgccttcctgagcggcgagcagaaaaaagccatcgtggacctgctgttcaagaccaaccggaaagtgaccgtgaagcagctgaaagaggactacttcaagaaaatcgagtgcttcgactccgtggaaatctccggcgtggaagatcggttcaacgcctccctgggcacataccacgatctgctgaaaattatcaaggacaaggacttcctggacaatgaggaaaacgaggacattctggaagatatcgtgctgaccctgacactgtttgaggacagagagatgatcgaggaacggctgaaaacctatgcccacctgttcgacgacaaagtgatgaagcagctgaagcggcggagatacaccggctggggcaggctgagccggaagctgatcaacggcatccgggacaagcagtccggcaagacaatcctggatttcctgaagtccgacggcttcgccaacagaaacttcatgcagctgatccacgacgacagcctgacctttaaagaggacatccagaaagcccaggtgtccggccagggcgatagcctgcacgagcacattgccaatctggccggcagccccgccattaagaagggcatcctgcagacagtgaaggtggtggacgagctcgtgaaagtgatgggccggcacaagcccgagaacatcgtgatcgaaatggccagagagaaccagaccacccagaagggacagaagaacagccgcgagagaatgaagcggatcgaagagggcatcaaagagctgggcagccagatcctgaaagaacaccccgtggaaaacacccagctgcagaacgagaagctgtacctgtactacctgcagaatgggcgggatatgtacgtggaccaggaactggacatcaaccggctgtccgactacgatgtggacgctatcgtgcctcagagctttctgaaggacgactccatcgataacaaagtgctgactcggagcgacaagaaccggggcaagagcgacaacgtgccctccgaagaggtcgtgaagaagatgaagaactactggcgccagctgctgaatgccaagctgattacccagaggaagttcgacaatctgaccaaggccgagagaggcggcctgagcgaactggataaggccggcttcatcaagagacagctggtggaaacccggcagatcacaaagcacgtggcacagatcctggactcccggatgaacactaagtacgacgagaacgacaaactgatccgggaagtgaaagtgatcaccctgaagtccaagctggtgtccgatttccggaaggatttccagttttacaaagtgcgcgagatcaacaactaccaccacgcccacgacgcctacctgaacgccgtcgtgggaaccgccctgatcaaaaagtaccctaagctggaaagcgagttcgtgtacggcgactacaaggtgtacgacgtgcggaagatgatcgccaagagcgagcaggaaatcggcaaggctaccgccaagtacttcttctacagcaacatcatgaactttttcaagaccgagattaccctggccaacggcgagatccggaagcggcctctgatcgagacaaacggcgaaacaggcgagatcgtgtgggataagggccgggactttgccaccgtgcggaaagtgctgtctatgccccaagtgaatatcgtgaaaaagaccgaggtgcagacaggcggcttcagcaaagagtctatcctgcccaagaggaacagcgacaagctgatcgccagaaagaaggactgggaccctaagaagtacggcggcttcgacagccccaccgtggcctattctgtgctggtggtggccaaagtggaaaagggcaagtccaagaaactgaagagtgtgaaagagctgctggggatcaccatcatggaaagaagcagcttcgagaagaatcccatcgactttctggaagccaagggctacaaagaagtgaaaaaggacctgatcatcaagctgcctaagtactccctgttcgagctggaaaacggccggaagagaatgctggcctctgccggcgaactgcagaagggaaacgaactggccctgccctccaaatatgtgaacttcctgtacctggccagccactatgagaagctgaagggctcccccgaggataatgagcagaaacagctgtttgtggaacagcacaaacactacctggacgagatcatcgagcagatcagcgagttctccaagagagtgatcctggccgacgctaatctggacaaggtgctgagcgcctacaacaagcacagagacaagcctatcagagagcaggccgagaatatcatccacctgtttaccctgaccaatctgggagcccctgccgccttcaagtactttgacaccaccatcgaccggaagaggtacaccagcaccaaagaggtgctggacgccaccctgatccaccagagcatcaccggcctgtacgagacacggatcgacctgtctcagctgggaggcgacccaaaaaagaagagaaaggtaagcggaagtgagaccccaggtacatccgaatcagcaacgcctgaaagcaccggtcggacactggtgaccttcaaggatgtatttgtggacttcaccagggaggagtggaagctgctggacactgctcagcagatcgtgtacagaaatgtgatgctggagaactataagaacctggtttccttgggttatcagcttactaagccagatgtgatcctccggttggagaagggagaagagccc

SEQ ID NO: 1504 - protein, 2218 aa, Synthetic construct
MNHDQEFDPPKVYPPVPAEKRKPIRVLSLFDGIATGLLVLKDLGIQVDRYIASEVCEDSITVGMVRHQGKIMYVGDVRSVTQKHIQEWGPFDLVIGGSPCNDLSIVNPARKGLYEGTGRLFFEFYRLLHDARPKEGDDRPFFWLFENVVAMGVSDKRDISRFLESNPVMIDAKEVSAAHRARYFWGNLPGMNRPLASTVNDKLELQECLEHGRIAKFSKVRTITTRSNSIKQGKDQHFPVFMNEKEDILWCTEMERVFGFPVHYTDVSNMSRLARQRLLGRSWSVPVIRHLFAPLKEYFACVSSGNSNANSRGPSFSSGLVPLSLRGSHMEVKANQRNIEDICICCGSLQVHTQHPLFEGGICAPCKDKFLDALFLYDDDGYQSYCSICCSGETLLICGNPDCTRCYCFECVDSLVGPGTSGKVHAMSNWVCYLCLPSSRSGLLQRRRKWRSQLKAFYDRESENPLEMFETVPVWRRQPVRVLSLFEDIKKELTSLGFLESGSDPGQLKHVVDVTDTVRKDVEEWGPFDLVYGATPPLGHTCDRPPSWYLFQFHRLLQYARPKPGSPRPFFWMFVDNLVLNKEDLDVASRFLEMEPVTIPDVHGGSLQNAVRVWSNIPAIRSRHWALVSEEELSLLAQNKQSSKLAAKWPTKLVKNCFLPLREYFKYFSTELTSSLGGPSSGAPPPSGGSPAGSPTSTEEGTSESATPESGPGTSTEPSEGSAPGSPAGSPTSTEEGTSTEPSEGSAPGTSTEPSEPKKKRKVMDKKYSIGLAIGTNSVGWAVITDEYKVPSKKFKVLGNTDRHSIKKNLIGALLFDSGETAEATRLKRTARRRYTRRKNRICYLQEIFSNEMAKVDDSFFHRLEESFLVEEDKKHERHPIFGNIVDEVAYHEKYPTIYHLRKKLVDSTDKADLRLIYLALAHMIKFRGHFLIEGDLNPDNSDVDKLFIQLVQTYNQLFEENPINASGVDAKAILSARLSKSRRLENLIAQLPGEKKNGLFGNLIALSLGLTPNFKSNFDLAEDAKLQLSKDTYDDDLDNLLAQIGDQYADLFLAAKNLSDAILLSDILRVNTEITKAPLSASMIKRYDEHHQDLTLLKALVRQQLPEKYKEIFFDQSKNGYAGYIDGGASQEEFYKFIKPILEKMDGTEELLVKLNREDLLRKQRTFDNGSIPHQIHLGELHAILRRQEDFYPFLKDNREKIEKILTFRIPYYVGPLARGNSRFAWMTRKSEETITPWNFEEVVDKGASAQSFIERMTNFDKNLPNEKVLPKHSLLYEYFTVYNELTKVKYVTEGMRKPAFLSGEQKKAIVDLLFKTNRKVTVKQLKEDYFKKIECFDSVEISGVEDRFNASLGTYHDLLKIIKDKDFLDNEENEDILEDIVLTLTLFEDREMIEERLKTYAHLFDDKVMKQLKRRRYTGWGRLSRKLINGIRDKQSGKTILDFLKSDGFANRNFMQLIHDDSLTFKEDIQKAQVSGQGDSLHEHIANLAGSPAIKKGILQTVKVVDELVKVMGRHKPENIVIEMARENQTTQKGQKNSRERMKRIEEGIKELGSQILKEHPVENTQLQNEKLYLYYLQNGRDMYVDQELDINRLSDYDVDAIVPQSFLKDDSIDNKVLTRSDKNRGKSDNVPSEEVVKKMKNYWRQLLNAKLITQRKFDNLTKAERGGLSELDKAGFIKRQLVETRQITKHVAQILDSRMNTKYDENDKLIREVKVITLKSKLVSDFRKDFQFYKVREINNYHHAHDAYLNAVVGTALIKKYPKLESEFVYGDYKVYDVRKMIAKSEQEIGKATAKYFFYSNIMNFFKTEITLANGEIRKRPLIETNGETGEIVWDKGRDFATVRKVLSMPQVNIVKKTEVQTGGFSKESILPKRNSDKLIARKKDWDPKKYGGFDSPTVAYSVLVVAKVEKGKSKKLKSVKELLGITIMERSSFEKNPIDFLEAKGYKEVKKDLIIKLPKYSLFELENGRKRMLASAGELQKGNELALPSKYVNFLYLASHYEKLKGSPEDNEQKQLFVEQHKHYLDEIIEQISEFSKRVILADANLDKVLSAYNKHRDKPIREQAENIIHLFTLTNLGAPAAFKYFDTTIDRKRYTSTKEVLDATLIHQSITGLYETRIDLSQLGGDPKKKRKVSGSETPGTSESATPESTGRTLVTFKDVFVDFTREEWKLLDTAQQIVYRNVMLENYKNLVSLGYQLTKPDVILRLEKGEEP

SEQ ID NO: 1505 - DNA, 6654 bp, Synthetic construct
  source 1..6654: mol_type = other DNA
atgaaccatgatcaagaattcgacccacctaaagtctacccacctgtgcccgccgaaaaaaggaaacccataagggtgctgtcactctttgatggcatcgccactggtctcctggttcttaaggatctgggaattcaggtcgatcggtacattgctagcgaggtttgtgaggatagtattacagtgggtatggtgcgccaccagggaaagatcatgtatgttggtgacgttaggagcgtcacccagaaacatatccaggagtggggaccctttgatttggtgatcggaggtagtccctgcaatgacctttccatcgtgaatccagccaggaaagggctgtatgaagggactggtaggctctttttcgagttttatcgcctgcttcacgacgctagacctaaggaaggtgacgataggcctttcttttggctttttgagaacgtcgtggcaatgggagtctccgacaaaagggacatttctcgctttctggaatctaaccccgttatgatcgatgccaaggaagtttctgccgctcacagggcaaggtacttctggggcaatctgcccggaatgaatcgcccactggccagtaccgtgaatgacaaactggagctgcaggagtgcctggagcacggaagaatcgcaaagttttctaaagtcaggaccattaccactcgcagtaactccataaaacagggtaaggaccagcattttcccgtcttcatgaatgaaaaggaagatattctgtggtgcactgaaatggagagagttttcgggtttcccgtgcactataccgatgtttccaacatgtcccgccttgcaagacaaaggcttttgggccgctcttggtctgtgccagtgatccggcacttgtttgctcccctcaaagagtacttcgcttgcgtcagttccggaaattcaaacgctaactctcggggtccatctttctccagtggtctcgtgccactgtctctccggggctctcacatggaagtcaaggctaaccagcgaaatatagaagacatctgcatctgctgcggaagtctccaggttcacacacagcaccctctgtttgagggagggatctgcgccccatgtaaggacaagttcctggatgccctcttcctgtacgacgatgacgggtaccaatcctactgctccatctgctgctccggagagacgctgctcatctgcggaaaccctgattgcacccgatgctactgcttcgagtgtgtggatagcctggtcggccccgggacctcggggaaggtgcacgccatgagcaactgggtgtgctacctgtgcctgccgtcctcccgaagcgggctgctgcagcgtcggaggaagtggcgcagccagctcaaggccttctacgaccgagagtcggagaatcccctggagatgtttgagacagtgccagtctggcggaggcagcccgttcgcgttctctctctgttcgaagatattaaaaaggaactcacctcccttgggttcctggagagcgggagcgaccccggacagcttaagcacgtggtcgacgtgactgacaccgtccgcaaagacgtggaggaatggggccccttcgatctggtctatggggcaacccctccccttgggcatacatgtgatcggcctccatcctggtacctgttccagtttcacagactcctgcagtatgccaggccaaagccagggagcccaaggccctttttctggatgttcgtcgacaacctggtcctgaacaaagaagatctcgacgttgctagtcgctttctcgaaatggagcccgtgaccattcccgacgtgcatggcggttccctccagaatgcagtcagggtttggagcaatatccctgccatcaggtcaaggcactgggcactggtttcagaggaagagctgtccctccttgcccagaacaagcagtcatccaaactggcagccaagtggccaactaagctggtcaagaactgctttcttcccctcagagaatattttaagtatttcagtactgaactgactagcagtctgggagggccgagctctggcgcacccccaccaagtggagggtctcctgccgggtccccaacatctactgaagaaggcaccagcgaatccgcaacgcccgagtcaggccctggtacctccacagaaccatctgaaggtagtgcgcctggttccccagctggaagccctacttccaccgaagaaggcacgtcaaccgaaccaagtgaaggatctgcccctgggaccagcactgaaccatctgagccaaaaaagaagagaaaggtaatggacaagaagtacagcatcggcctggccatcggcaccaactctgtgggctgggccgtgatcaccgacgagtacaaggtgcccagcaagaaattcaaggtgctgggcaacaccgaccggcacagcatcaagaagaacctgatcggcgccctgctgttcgacagcggagaaacagccgaggccacccggctgaagagaaccgccagaagaagatacaccagacggaagaaccggatctgctatctgcaagagatcttcagcaacgagatggccaaggtggacgacagcttcttccacagactggaagagtccttcctggtggaagaggataagaagcacgagcggcaccccatcttcggcaacatcgtggacgaggtggcctaccacgagaagtaccccaccatctaccacctgagaaagaaactggtggacagcaccgacaaggccgacctgcggctgatctatctggccctggcccacatgatcaagttccggggccacttcctgatcgagggcgacctgaaccccgacaacagcgacgtggacaagctgttcatccagctggtgcagacctacaaccagctgttcgaggaaaaccccatcaacgccagcggcgtggacgccaaggccatcctgtctgccagactgagcaagagcagacggctggaaaatctgatcgcccagctgcccggcgagaagaagaatggcctgttcggcaacctgattgccctgagcctgggcctgacccccaacttcaagagcaacttcgacctggccgaggatgccaaactgcagctgagcaaggacacctacgacgacgacctggacaacctgctggcccagatcggcgaccagtacgccgacctgtttctggccgccaagaacctgtccgacgccatcctgctgagcgacatcctgagagtgaacaccgagatcaccaaggcccccctgagcgcctctatgatcaagagatacgacgagcaccaccaggacctgaccctgctgaaagctctcgtgcggcagcagctgcctgagaagtacaaagagattttcttcgaccagagcaagaacggctacgccggctacatcgatggcggagccagccaggaagagttctacaagttcatcaagcccatcctggaaaagatggacggcaccgaggaactgctcgtgaagctgaacagagaggacctgctgcggaagcagcggaccttcgacaacggcagcatcccccaccagatccacctgggagagctgcacgccattctgcggcggcaggaagatttttacccattcctgaaggacaaccgggaaaagatcgagaagatcctgaccttccgcatcccctactacgtgggccctctggccaggggaaacagcagattcgcctggatgaccagaaagagcgaggaaaccatcaccccctggaacttcgaggaagtggtggacaagggcgccagcgcccagagcttcatcgagcggatgaccaacttcgataagaacctgcccaacgagaaggtgctgcccaagcacagcctgctgtacgagtacttcaccgtgtacaacgagctgaccaaagtgaaatacgtgaccgagggaatgagaaagcccgccttcctgagcggcgagcagaaaaaagccatcgtggacctgctgttcaagaccaaccggaaagtgaccgtgaagcagctgaaagaggactacttcaagaaaatcgagtgcttcgactccgtggaaatctccggcgtggaagatcggttcaacgcctccctgggcacataccacgatctgctgaaaattatcaaggacaaggacttcctggacaatgaggaaaacgaggacattctggaagatatcgtgctgaccctgacactgtttgaggacagagagatgatcgaggaacggctgaaaacctatgcccacctgttcgacgacaaagtgatgaagcagctgaagcggcggagatacaccggctggggcaggctgagccggaagctgatcaacggcatccgggacaagcagtccggcaagacaatcctggatttcctgaagtccgacggcttcgccaacagaaacttcatgcagctgatccacgacgacagcctgacctttaaagaggacatccagaaagcccaggtgtccggccagggcgatagcctgcacgagcacattgccaatctggccggcagccccgccattaagaagggcatcctgcagacagtgaaggtggtggacgagctcgtgaaagtgatgggccggcacaagcccgagaacatcgtgatcgaaatggccagagagaaccagaccacccagaagggacagaagaacagccgcgagagaatgaagcggatcgaagagggcatcaaagagctgggcagccagatcctgaaagaacaccccgtggaaaacacccagctgcagaacgagaagctgtacctgtactacctgcagaatgggcgggatatgtacgtggaccaggaactggacatcaaccggctgtccgactacgatgtggacgctatcgtgcctcagagctttctgaaggacgactccatcgataacaaagtgctgactcggagcgacaagaaccggggcaagagcgacaacgtgccctccgaagaggtcgtgaagaagatgaagaactactggcgccagctgctgaatgccaagctgattacccagaggaagttcgacaatctgaccaaggccgagagaggcggcctgagcgaactggataaggccggcttcatcaagagacagctggtggaaacccggcagatcacaaagcacgtggcacagatcctggactcccggatgaacactaagtacgacgagaacgacaaactgatccgggaagtgaaagtgatcaccctgaagtccaagctggtgtccgatttccggaaggatttccagttttacaaagtgcgcgagatcaacaactaccaccacgcccacgacgcctacctgaacgccgtcgtgggaaccgccctgatcaaaaagtaccctaagctggaaagcgagttcgtgtacggcgactacaaggtgtacgacgtgcggaagatgatcgccaagagcgagcaggaaatcggcaaggctaccgccaagtacttcttctacagcaacatcatgaactttttcaagaccgagattaccctggccaacggcgagatccggaagcggcctctgatcgagacaaacggcgaaacaggcgagatcgtgtgggataagggccgggactttgccaccgtgcggaaagtgctgtctatgccccaagtgaatatcgtgaaaaagaccgaggtgcagacaggcggcttcagcaaagagtctatcctgcccaagaggaacagcgacaagctgatcgccagaaagaaggactgggaccctaagaagtacggcggcttcgacagccccaccgtggcctattctgtgctggtggtggccaaagtggaaaagggcaagtccaagaaactgaagagtgtgaaagagctgctggggatcaccatcatggaaagaagcagcttcgagaagaatcccatcgactttctggaagccaagggctacaaagaagtgaaaaaggacctgatcatcaagctgcctaagtactccctgttcgagctggaaaacggccggaagagaatgctggcctctgccggcgaactgcagaagggaaacgaactggccctgccctccaaatatgtgaacttcctgtacctggccagccactatgagaagctgaagggctcccccgaggataatgagcagaaacagctgtttgtggaacagcacaaacactacctggacgagatcatcgagcagatcagcgagttctccaagagagtgatcctggccgacgctaatctggacaaggtgctgagcgcctacaacaagcacagagacaagcctatcagagagcaggccgagaatatcatccacctgtttaccctgaccaatctgggagcccctgccgccttcaagtactttgacaccaccatcgaccggaagaggtacaccagcaccaaagaggtgctggacgccaccctgatccaccagagcatcaccggcctgtacgagacacggatcgacctgtctcagctgggaggcgacccaaaaaagaagagaaaggtaagcggaagtgagaccccaggtacatccgaatcagcaacgcctgaaagcaccggtcggacactggtgaccttcaaggatgtatttgtggacttcaccagggaggagtggaagctgctggacactgctcagcagatcgtgtacagaaatgtgatgctggagaactataagaacctggtttccttgggttatcagcttactaagccagatgtgatcctccggttggagaagggagaagagccc

SEQ ID NO: 1506 - protein, 2109 aa, Synthetic construct
MPKKKRKVPKKKRKVNHDQEFDPPKVYPPVPAEKRKPIRVLSLFDGIATGLLVLKDLGIQVDRYIASEVCEDSITVGMVRHQGKIMYVGDVRSVTQKHIQEWGPFDLVIGGSPCNDLSIVNPARKGLYEGTGRLFFEFYRLLHDARPKEGDDRPFFWLFENVVAMGVSDKRDISRFLESNPVMIDAKEVSAAHRARYFWGNLPGMNRPLASTVNDKLELQECLEHGRIAKFSKVRTITTRSNSIKQGKDQHFPVFMNEKEDILWCTEMERVFGFPVHYTDVSNMSRLARQRLLGRSWSVPVIRHLFAPLKEYFACVSSGNSNANSRGPSFSSGLVPLSLRGSHNPLEMFETVPVWRRQPVRVLSLFEDIKKELTSLGFLESGSDPGQLKHVVDVTDTVRKDVEEWGPFDLVYGATPPLGHTCDRPPSWYLFQFHRLLQYARPKPGSPRPFFWMFVDNLVLNKEDLDVASRFLEMEPVTIPDVHGGSLQNAVRVWSNIPAIRSRHWALVSEEELSLLAQNKQSSKLAAKWPTKLVKNCFLPLREYFKYFSTELTSSLGGPSSGAPPPSGGSPAGSPTSTEEGTSESATPESGPGTSTEPSEGSAPGSPAGSPTSTEEGTSTEPSEGSAPGTSTEPSEMDKKYSIGLAIGTNSVGWAVITDEYKVPSKKFKVLGNTDRHSIKKNLIGALLFDSGETAEATRLKRTARRRYTRRKNRICYLQEIFSNEMAKVDDSFFHRLEESFLVEEDKKHERHPIFGNIVDEVAYHEKYPTIYHLRKKLVDSTDKADLRLIYLALAHMIKFRGHFLIEGDLNPDNSDVDKLFIQLVQTYNQLFEENPINASGVDAKAILSARLSKSRRLENLIAQLPGEKKNGLFGNLIALSLGLTPNFKSNFDLAEDAKLQLSKDTYDDDLDNLLAQIGDQYADLFLAAKNLSDAILLSDILRVNTEITKAPLSASMIKRYDEHHQDLTLLKALVRQQLPEKYKEIFFDQSKNGYAGYIDGGASQEEFYKFIKPILEKMDGTEELLVKLNREDLLRKQRTFDNGSIPHQIHLGELHAILRRQEDFYPFLKDNREKIEKILTFRIPYYVGPLARGNSRFAWMTRKSEETITPWNFEEVVDKGASAQSFIERMTNFDKNLPNEKVLPKHSLLYEYFTVYNELTKVKYVTEGMRKPAFLSGEQKKAIVDLLFKTNRKVTVKQLKEDYFKKIECFDSVEISGVEDRFNASLGTYHDLLKIIKDKDFLDNEENEDILEDIVLTLTLFEDREMIEERLKTYAHLFDDKVMKQLKRRRYTGWGRLSRKLINGIRDKQSGKTILDFLKSDGFANRNFMQLIHDDSLTFKEDIQKAQVSGQGDSLHEHIANLAGSPAIKKGILQTVKVVDELVKVMGRHKPENIVIEMARENQTTQKGQKNSRERMKRIEEGIKELGSQILKEHPVENTQLQNEKLYLYYLQNGRDMYVDQELDINRLSDYDVDAIVPQSFLKDDSIDNKVLTRSDKNRGKSDNVPSEEVVKKMKNYWRQLLNAKLITQRKFDNLTKAERGGLSELDKAGFIKRQLVETRQITKHVAQILDSRMNTKYDENDKLIREVKVITLKSKLVSDFRKDFQFYKVREINNYHHAHDAYLNAVVGTALIKKYPKLESEFVYGDYKVYDVRKMIAKSEQEIGKATAKYFFYSNIMNFFKTEITLANGEIRKRPLIETNGETGEIVWDKGRDFATVRKVLSMPQVNIVKKTEVQTGGFSKESILPKRNSDKLIARKKDWDPKKYGGFDSPTVAYSVLVVAKVEKGKSKKLKSVKELLGITIMERSSFEKNPIDFLEAKGYKEVKKDLIIKLPKYSLFELENGRKRMLASAGELQKGNELALPSKYVNFLYLASHYEKLKGSPEDNEQKQLFVEQHKHYLDEIIEQISEFSKRVILADANLDKVLSAYNKHRDKPIREQAENIIHLFTLTNLGAPAAFKYFDTTIDRKRYTSTKEVLDATLIHQSITGLYETRIDLSQLGGDSGSETPGTSESATPESTGRTLVTFKDVFVDFTREEWKLLDTAQQIVYRNVMLENYKNLVSLGYQLTKPDVILRLEKGEEPSADYKDDDDKAPKKKRKVPKKKRKV

SEQ ID NO: 1507 - DNA, 6327 bp, Synthetic construct
  source 1..6327: mol_type = other DNA
atgccaaaaaagaagagaaaggtaccgaagaaaaaaagaaaggtcaaccacgaccaggaattcgaccctccaaaggtttacccacctgtcccagctgagaagaggaagcccatccgggtgctgtctctctttgatggaatcgctacagggctcctggtgctgaaggacttgggcattcaggtggaccgctacattgcctcggaggtgtgtgaggactccatcacggtgggcatggtgcggcaccaggggaagatcatgtacgtcggggacgtccgcagcgtcacacagaagcatatccaggagtggggcccattcgatctggtgattgggggcagtccctgcaatgacctctccatcgtcaaccctgctcgcaagggcctctacgagggcactggccggctcttctttgagttctaccgcctcctgcatgatgcgcggcccaaggagggagatgatcgccccttcttctggctctttgagaatgtggtggccatgggcgttagtgacaagagggacatctcgcgatttctcgagtccaaccctgtgatgattgatgccaaagaagtgtcagctgcacacagggcccgctacttctggggtaaccttcccggtatgaacaggccgttggcatccactgtgaatgataagctggagctgcaggagtgtctggagcatggcaggatagccaagttcagcaaagtgaggaccattactacgaggtcaaactccataaagcagggcaaagaccagcattttcctgtcttcatgaatgagaaagaggacatcttatggtgcactgaaatggaaagggtatttggtttcccagtccactatactgacgtctccaacatgagccgcttggcgaggcagagactgctgggccggtcatggagcgtgccagtcatccgccacctcttcgctccgctgaaggagtattttgcgtgtgtgtctagcggcaatagtaacgctaacagccgcgggccgagcttcagcagcggcctggtgccgttaagcttgcgcggcagccataatccccttgagatgttcgaaaccgtgcctgtgtggaggagacagccagtccgggtgctgtccctttttgaagacatcaagaaagagctgacgagtttgggctttttggaaagtggttctgacccgggacaactgaagcatgtggttgatgtcacagacacagtgaggaaggatgtggaggagtggggacccttcgatcttgtgtacggcgccacacctcccctgggccacacctgtgaccgtcctcccagctggtacctgttccagttccaccggctcctgcagtacgcacggcccaagccaggcagccccaggcccttcttctggatgttcgtggacaatctggtgctgaacaaggaagacctggacgtcgcatctcgcttcctggagatggagccagtcaccatcccagatgtccacggcggatccttgcagaatgctgtccgcgtgtggagcaacatcccagccataaggagcaggcactgggctctggtttcggaagaagaattgtccctgctggcccagaacaagcagagctcgaagctcgcggccaagtggcccaccaagctggtgaagaactgctttctccccctaagagaatatttcaagtatttttcaacagaactcacttcctctttaggagggccgagctctggcgcacccccaccaagtggagggtctcctgccgggtccccaacatctactgaagaaggcaccagcgaatccgcaacgcccgagtcaggccctggtacctccacagaaccatctgaaggtagtgcgcctggttccccagctggaagccctacttccaccgaagaaggcacgtcaaccgaaccaagtgaaggatctgcccctgggaccagcactgaaccatctgagatggacaagaagtacagcatcggcctggccatcggcaccaactctgtgggctgggccgtgatcaccgacgagtacaaggtgcccagcaagaaattcaaggtgctgggcaacaccgaccggcacagcatcaagaagaacctgatcggcgccctgctgttcgacagcggagaaacagccgaggccacccggctgaagagaaccgccagaagaagatacaccagacggaagaaccggatctgctatctgcaagagatcttcagcaacgagatggccaaggtggacgacagcttcttccacagactggaagagtccttcctggtggaagaggataagaagcacgagcggcaccccatcttcggcaacatcgtggacgaggtggcctaccacgagaagtaccccaccatctaccacctgagaaagaaactggtggacagcaccgacaaggccgacctgcggctgatctatctggccctggcccacatgatcaagttccggggccacttcctgatcgagggcgacctgaaccccgacaacagcgacgtggacaagctgttcatccagctggtgcagacctacaaccagctgttcgaggaaaaccccatcaacgccagcggcgtggacgccaaggccatcctgtctgccagactgagcaagagcagacggctggaaaatctgatcgcccagctgcccggcgagaagaagaatggcctgttcggcaacctgattgccctgagcctgggcctgacccccaacttcaagagcaacttcgacctggccgaggatgccaaactgcagctgagcaaggacacctacgacgacgacctggacaacctgctggcccagatcggcgaccagtacgccgacctgtttctggccgccaagaacctgtccgacgccatcctgctgagcgacatcctgagagtgaacaccgagatcaccaaggcccccctgagcgcctctatgatcaagagatacgacgagcaccaccaggacctgaccctgctgaaagctctcgtgcggcagcagctgcctgagaagtacaaagagattttcttcgaccagagcaagaacggctacgccggctacatcgatggcggagccagccaggaagagttctacaagttcatcaagcccatcctggaaaagatggacggcaccgaggaactgctcgtgaagctgaacagagaggacctgctgcggaagcagcggaccttcgacaacggcagcatcccccaccagatccacctgggagagctgcacgccattctgcggcggcaggaagatttttacccattcctgaaggacaaccgggaaaagatcgagaagatcctgaccttccgcatcccctactacgtgggccctctggccaggggaaacagcagattcgcctggatgaccagaaagagcgaggaaaccatcaccccctggaacttcgaggaagtggtggacaagggcgccagcgcccagagcttcatcgagcggatgaccaacttcgataagaacctgcccaacgagaaggtgctgcccaagcacagcctgctgtacgagtacttcaccgtgtacaacgagctgaccaaagtgaaatacgtgaccgagggaatgagaaagcccgccttcctgagcggcgagcagaaaaaagccatcgtggacctgctgttcaagaccaaccggaaagtgaccgtgaagcagctgaaagaggactacttcaagaaaatcgagtgcttcgactccgtggaaatctccggcgtggaagatcggttcaacgcctccctgggcacataccacgatctgctgaaaattatcaaggacaaggacttcctggacaatgaggaaaacgaggacattctggaagatatcgtgctgaccctgacactgtttgaggacagagagatgatcgaggaacggctgaaaacctatgcccacctgttcgacgacaaagtgatgaagcagctgaagcggcggagatacaccggctggggcaggctgagccggaagctgatcaacggcatccgggacaagcagtccggcaagacaatcctggatttcctgaagtccgacggcttcgccaacagaaacttcatgcagctgatccacgacgacagcctgacctttaaagaggacatccagaaagcccaggtgtccggccagggcgatagcctgcacgagcacattgccaatctggccggcagccccgccattaagaagggcatcctgcagacagtgaaggtggtggacgagctcgtgaaagtgatgggccggcacaagcccgagaacatcgtgatcgaaatggccagagagaaccagaccacccagaagggacagaagaacagccgcgagagaatgaagcggatcgaagagggcatcaaagagctgggcagccagatcctgaaagaacaccccgtggaaaacacccagctgcagaacgagaagctgtacctgtactacctgcagaatgggcgggatatgtacgtggaccaggaactggacatcaaccggctgtccgactacgatgtggacgctatcgtgcctcagagctttctgaaggacgactccatcgataacaaagtgctgactcggagcgacaagaaccggggcaagagcgacaacgtgccctccgaagaggtcgtgaagaagatgaagaactactggcgccagctgctgaatgccaagctgattacccagaggaagttcgacaatctgaccaaggccgagagaggcggcctgagcgaactggataaggccggcttcatcaagagacagctggtggaaacccggcagatcacaaagcacgtggcacagatcctggactcccggatgaacactaagtacgacgagaacgacaaactgatccgggaagtgaaagtgatcaccctgaagtccaagctggtgtccgatttccggaaggatttccagttttacaaagtgcgcgagatcaacaactaccaccacgcccacgacgcctacctgaacgccgtcgtgggaaccgccctgatcaaaaagtaccctaagctggaaagcgagttcgtgtacggcgactacaaggtgtacgacgtgcggaagatgatcgccaagagcgagcaggaaatcggcaaggctaccgccaagtacttcttctacagcaacatcatgaactttttcaagaccgagattaccctggccaacggcgagatccggaagcggcctctgatcgagacaaacggcgaaacaggcgagatcgtgtgggataagggccgggactttgccaccgtgcggaaagtgctgtctatgccccaagtgaatatcgtgaaaaagaccgaggtgcagacaggcggcttcagcaaagagtctatcctgcccaagaggaacagcgacaagctgatcgccagaaagaaggactgggaccctaagaagtacggcggcttcgacagccccaccgtggcctattctgtgctggtggtggccaaagtggaaaagggcaagtccaagaaactgaagagtgtgaaagagctgctggggatcaccatcatggaaagaagcagcttcgagaagaatcccatcgactttctggaagccaagggctacaaagaagtgaaaaaggacctgatcatcaagctgcctaagtactccctgttcgagctggaaaacggccggaagagaatgctggcctctgccggcgaactgcagaagggaaacgaactggccctgccctccaaatatgtgaacttcctgtacctggccagccactatgagaagctgaagggctcccccgaggataatgagcagaaacagctgtttgtggaacagcacaaacactacctggacgagatcatcgagcagatcagcgagttctccaagagagtgatcctggccgacgctaatctggacaaggtgctgagcgcctacaacaagcacagagacaagcctatcagagagcaggccgagaatatcatccacctgtttaccctgaccaatctgggagcccctgccgccttcaagtactttgacaccaccatcgaccggaagaggtacaccagcaccaaagaggtgctggacgccaccctgatccaccagagcatcaccggcctgtacgagacacggatcgacctgtctcagctgggaggcgacagcggaagtgagaccccaggtacatccgaatcagcaacgcctgaaagcaccggtcggacactggtgaccttcaaggatgtatttgtggacttcaccagggaggagtggaagctgctggacactgctcagcagatcgtgtacagaaatgtgatgctggagaactataagaacctggtttccttgggttatcagcttactaagccagatgtgatcctccggttggagaagggagaagagcccagcgctgattacaaagatgatgacgataaagccccaaaaaagaagagaaaggtaccgaagaaaaaaagaaaggtc

SEQ ID NO: 1508 - protein, 2111 aa, Synthetic construct
MPKKKRKVPKKKRKVNHDQEFDPPKVYPPVPAEKRKPIRVLSLFDGIATGLLVLKDLGIQVDRYIASEVCEDSITVGMVRHQGKIMYVGDVRSVTQKHIQEWGPFDLVIGGSPCNDLSIVNPARKGLYEGTGRLFFEFYRLLHDARPKEGDDRPFFWLFENVVAMGVSDKRDISRFLESNPVMIDAKEVSAAHRARYFWGNLPGMNRPLASTVNDKLELQECLEHGRIAKFSKVRTITTRSNSIKQGKDQHFPVFMNEKEDILWCTEMERVFGFPVHYTDVSNMSRLARQRLLGRSWSVPVIRHLFAPLKEYFACVSSGNSNANSRGPSFSSGLVPLSLRGSHMGPMEIYKTVSAWKRQPVRVLSLFRNIDKVLKSLGFLESGSGSGGGTLKYVEDVTNVVRRDVEKWGPFDLVYGSTQPLGSSCDRCPGWYMFQFHRILQYALPRQESQRPFFWIFMDNLLLTEDDQETTTRFLQTEAVTLQDVRGRDYQNAMRVWSNIPGLKSKHAPLTPKEEEYLQAQVRSRSKLDAPKVDLLVKNCLLPLREYFKYFSQNSLPLGGPSSGAPPPSGGSPAGSPTSTEEGTSESATPESGPGTSTEPSEGSAPGSPAGSPTSTEEGTSTEPSEGSAPGTSTEPSEMDKKYSIGLAIGTNSVGWAVITDEYKVPSKKFKVLGNTDRHSIKKNLIGALLFDSGETAEATRLKRTARRRYTRRKNRICYLQEIFSNEMAKVDDSFFHRLEESFLVEEDKKHERHPIFGNIVDEVAYHEKYPTIYHLRKKLVDSTDKADLRLIYLALAHMIKFRGHFLIEGDLNPDNSDVDKLFIQLVQTYNQLFEENPINASGVDAKAILSARLSKSRRLENLIAQLPGEKKNGLFGNLIALSLGLTPNFKSNFDLAEDAKLQLSKDTYDDDLDNLLAQIGDQYADLFLAAKNLSDAILLSDILRVNTEITKAPLSASMIKRYDEHHQDLTLLKALVRQQLPEKYKEIFFDQSKNGYAGYIDGGASQEEFYKFIKPILEKMDGTEELLVKLNREDLLRKQRTFDNGSIPHQIHLGELHAILRRQEDFYPFLKDNREKIEKILTFRIPYYVGPLARGNSRFAWMTRKSEETITPWNFEEVVDKGASAQSFIERMTNFDKNLPNEKVLPKHSLLYEYFTVYNELTKVKYVTEGMRKPAFLSGEQKKAIVDLLFKTNRKVTVKQLKEDYFKKIECFDSVEISGVEDRFNASLGTYHDLLKIIKDKDFLDNEENEDILEDIVLTLTLFEDREMIEERLKTYAHLFDDKVMKQLKRRRYTGWGRLSRKLINGIRDKQSGKTILDFLKSDGFANRNFMQLIHDDSLTFKEDIQKAQVSGQGDSLHEHIANLAGSPAIKKGILQTVKVVDELVKVMGRHKPENIVIEMARENQTTQKGQKNSRERMKRIEEGIKELGSQILKEHPVENTQLQNEKLYLYYLQNGRDMYVDQELDINRLSDYDVDAIVPQSFLKDDSIDNKVLTRSDKNRGKSDNVPSEEVVKKMKNYWRQLLNAKLITQRKFDNLTKAERGGLSELDKAGFIKRQLVETRQITKHVAQILDSRMNTKYDENDKLIREVKVITLKSKLVSDFRKDFQFYKVREINNYHHAHDAYLNAVVGTALIKKYPKLESEFVYGDYKVYDVRKMIAKSEQEIGKATAKYFFYSNIMNFFKTEITLANGEIRKRPLIETNGETGEIVWDKGRDFATVRKVLSMPQVNIVKKTEVQTGGFSKESILPKRNSDKLIARKKDWDPKKYGGFDSPTVAYSVLVVAKVEKGKSKKLKSVKELLGITIMERSSFEKNPIDFLEAKGYKEVKKDLIIKLPKYSLFELENGRKRMLASAGELQKGNELALPSKYVNFLYLASHYEKLKGSPEDNEQKQLFVEQHKHYLDEIIEQISEFSKRVILADANLDKVLSAYNKHRDKPIREQAENIIHLFTLTNLGAPAAFKYFDTTIDRKRYTSTKEVLDATLIHQSITGLYETRIDLSQLGGDSGSETPGTSESATPESTGRTLVTFKDVFVDFTREEWKLLDTAQQIVYRNVMLENYKNLVSLGYQLTKPDVILRLEKGEEPSADYKDDDDKAPKKKRKVPKKKRKV

SEQ ID NO: 1509 - DNA, 6336 bp, Synthetic construct
  source 1..6336: mol_type = other DNA
atgccaaaaaagaagagaaaggtaccgaagaaaaaaagaaaggtatacaaccatgaccaggaattcgaccccccaaaggtttacccacctgtgccagctgagaagaggaagcccatccgcgtgctgtctctctttgatgggattgctacagggctcctggtgctgaaggacctgggcatccaagtggaccgctacattgcctccgaggtgtgtgaggactccatcacggtgggcatggtgcggcaccagggaaagatcatgtacgtcggggacgtccgcagcgtcacacagaagcatatccaggagtggggcccattcgacctggtgattggaggcagtccctgcaatgacctctccattgtcaaccctgcccgcaagggactttatgagggtactggccgcctcttctttgagttctaccgcctcctgcatgatgcgcggcccaaggagggagatgatcgccccttcttctggctctttgagaatgtggtggccatgggcgttagtgacaagagggacatctcgcgatttcttgagtctaaccccgtgatgattgacgccaaagaagtgtctgctgcacacagggcccgttacttctggggtaaccttcctggcatgaacaggcctttggcatccactgtgaatgataagctggagctgcaagagtgtctggagcacggcagaatagccaagttcagcaaagtgaggaccattaccaccaggtcaaactctataaagcagggcaaagaccagcatttccccgtcttcatgaacgagaaggaggacatcctgtggtgcactgaaatggaaagggtgtttggcttccccgtccactacacagacgtctccaacatgagccgcttggcgaggcagagactgctgggccgatcgtggagcgtgccggtcatccgccacctcttcgctccgctgaaggaatattttgcttgtgtgtctagcggcaatagtaacgctaacagccgcgggccgagcttcagcagcggcctggtgccgttaagcttgcgcggcagccatatgggccctatggagatatacaagacagtgtctgcatggaagagacagccagtgcgggtactgagcctcttcagaaacatcgacaaggtactaaagagtttgggcttcttggaaagcggttctggttctgggggaggaacgctgaagtacgtggaagatgtcacaaatgtcgtgaggagagacgtggagaaatggggcccctttgacctggtgtacggctcgacgcagcccctaggcagctcttgtgatcgctgtcccggctggtacatgttccagttccaccggatcctgcagtatgcgctgcctcgccaggagagtcagcggcccttcttctggatattcatggacaatctgctgctgactgaggatgaccaagagacaactacccgcttccttcagacagaggctgtgaccctccaggatgtccgtggcagagactaccagaatgctatgcgggtgtggagcaacattccagggctgaagagcaagcatgcgcccctgaccccaaaggaagaagagtatctgcaagcccaagtcagaagcaggagcaagctggacgccccgaaagttgacctcctggtgaagaactgccttctcccgctgagagagtacttcaagtatttttctcaaaactcacttcctcttggagggccgagctctggcgcacccccaccaagtggagggtctcctgccgggtccccaacatctactgaagaaggcaccagcgaatccgcaacgcccgagtcaggccctggtacctccacagaaccatctgaaggtagtgcgcctggttccccagctggaagccctacttccaccgaagaaggcacgtcaaccgaaccaagtgaaggatctgcccctgggaccagcactgaaccatctgagatggacaagaagtacagcatcggcctggccatcggcaccaactctgtgggctgggccgtgatcaccgacgagtacaaggtgcccagcaagaaattcaaggtgctgggcaacaccgaccggcacagcatcaagaagaacctgatcggcgccctgctgttcgacagcggagaaacagccgaggccacccggctgaagagaaccgccagaagaagatacaccagacggaagaaccggatctgctatctgcaagagatcttcagcaacgagatggccaaggtggacgacagcttcttccacagactggaagagtccttcctggtggaagaggataagaagcacgagcggcaccccatcttcggcaacatcgtggacgaggtggcctaccacgagaagtaccccaccatctaccacctgagaaagaaactggtggacagcaccgacaaggccgacctgcggctgatctatctggccctggcccacatgatcaagttccggggccacttcctgatcgagggcgacctgaaccccgacaacagcgacgtggacaagctgttcatccagctggtgcagacctacaaccagctgttcgaggaaaaccccatcaacgccagcggcgtggacgccaaggccatcctgtctgccagactgagcaagagcagacggctggaaaatctgatcgcccagctgcccggcgagaagaagaatggcctgttcggcaacctgattgccctgagcctgggcctgacccccaacttcaagagcaacttcgacctggccgaggatgccaaactgcagctgagcaaggacacctacgacgacgacctggacaacctgctggcccagatcggcgaccagtacgccgacctgtttctggccgccaagaacctgtccgacgccatcctgctgagcgacatcctgagagtgaacaccgagatcaccaaggcccccctgagcgcctctatgatcaagagatacgacgagcaccaccaggacctgaccctgctgaaagctctcgtgcggcagcagctgcctgagaagtacaaagagattttcttcgaccagagcaagaacggctacgccggctacatcgatggcggagccagccaggaagagttctacaagttcatcaagcccatcctggaaaagatggacggcaccgaggaactgctcgtgaagctgaacagagaggacctgctgcggaagcagcggaccttcgacaacggcagcatcccccaccagatccacctgggagagctgcacgccattctgcggcggcaggaagatttttacccattcctgaaggacaaccgggaaaagatcgagaagatcctgaccttccgcatcccctactacgtgggccctctggccaggggaaacagcagattcgcctggatgaccagaaagagcgaggaaaccatcaccccctggaacttcgaggaagtggtggacaagggcgccagcgcccagagcttcatcgagcggatgaccaacttcgataagaacctgcccaacgagaaggtgctgcccaagcacagcctgctgtacgagtacttcaccgtgtacaacgagctgaccaaagtgaaatacgtgaccgagggaatgagaaagcccgccttcctgagcggcgagcagaaaaaagccatcgtggacctgctgttcaagaccaaccggaaagtgaccgtgaagcagctgaaagaggactacttcaagaaaatcgagtgcttcgactccgtggaaatctccggcgtggaagatcggttcaacgcctccctgggcacataccacgatctgctgaaaattatcaaggacaaggacttcctggacaatgaggaaaacgaggacattctggaagatatcgtgctgaccctgacactgtttgaggacagagagatgatcgaggaacggctgaaaacctatgcccacctgttcgacgacaaagtgatgaagcagctgaagcggcggagatacaccggctggggcaggctgagccggaagctgatcaacggcatccgggacaagcagtccggcaagacaatcctggatttcctgaagtccgacggcttcgccaacagaaacttcatgcagctgatccacgacgacagcctgacctttaaagaggacatccagaaagcccaggtgtccggccagggcgatagcctgcacgagcacattgccaatctggccggcagccccgccattaagaagggcatcctgcagacagtgaaggtggtggacgagctcgtgaaagtgatgggccggcacaagcccgagaacatcgtgatcgaaatggccagagagaaccagaccacccagaagggacagaagaacagccgcgagagaatgaagcggatcgaagagggcatcaaagagctgggcagccagatcctgaaagaacaccccgtggaaaacacccagctgcagaacgagaagctgtacctgtactacctgcagaatgggcgggatatgtacgtggaccaggaactggacatcaaccggctgtccgactacgatgtggacgctatcgtgcctcagagctttctgaaggacgactccatcgataacaaagtgctgactcggagcgacaagaaccggggcaagagcgacaacgtgccctccgaagaggtcgtgaagaagatgaagaactactggcgccagctgctgaatgccaagctgattacccagaggaagttcgacaatctgaccaaggccgagagaggcggcctgagcgaactggataaggccggcttcatcaagagacagctggtggaaacccggcagatcacaaagcacgtggcacagatcctggactcccggatgaacactaagtacgacgagaacgacaaactgatccgggaagtgaaagtgatcaccctgaagtccaagctggtgtccgatttccggaaggatttccagttttacaaagtgcgcgagatcaacaactaccaccacgcccacgacgcctacctgaacgccgtcgtgggaaccgccctgatcaaaaagtaccctaagctggaaagcgagttcgtgtacggcgactacaaggtgtacgacgtgcggaagatgatcgccaagagcgagcaggaaatcggcaaggctaccgccaagtacttcttctacagcaacatcatgaactttttcaagaccgagattaccctggccaacggcgagatccggaagcggcctctgatcgagacaaacggcgaaacaggcgagatcgtgtgggataagggccgggactttgccaccgtgcggaaagtgctgtctatgccccaagtgaatatcgtgaaaaagaccgaggtgcagacaggcggcttcagcaaagagtctatcctgcccaagaggaacagcgacaagctgatcgccagaaagaaggactgggaccctaagaagtacggcggcttcgacagccccaccgtggcctattctgtgctggtggtggccaaagtggaaaagggcaagtccaagaaactgaagagtgtgaaagagctgctggggatcaccatcatggaaagaagcagcttcgagaagaatcccatcgactttctggaagccaagggctacaaagaagtgaaaaaggacctgatcatcaagctgcctaagtactccctgttcgagctggaaaacggccggaagagaatgctggcctctgccggcgaactgcagaagggaaacgaactggccctgccctccaaatatgtgaacttcctgtacctggccagccactatgagaagctgaagggctcccccgaggataatgagcagaaacagctgtttgtggaacagcacaaacactacctggacgagatcatcgagcagatcagcgagttctccaagagagtgatcctggccgacgctaatctggacaaggtgctgagcgcctacaacaagcacagagacaagcctatcagagagcaggccgagaatatcatccacctgtttaccctgaccaatctgggagcccctgccgccttcaagtactttgacaccaccatcgaccggaagaggtacaccagcaccaaagaggtgctggacgccaccctgatccaccagagcatcaccggcctgtacgagacacggatcgacctgtctcagctgggaggcgacagcggaagtgagaccccaggtacatccgaatcagcaacgcctgaaagcaccggtcggacactggtgaccttcaaggatgtatttgtggacttcaccagggaggagtggaagctgctggacactgctcagcagatcgtgtacagaaatgtgatgctggagaactataagaacctggtttccttgggttatcagcttactaagccagatgtgatcctccggttggagaagggagaagagcccagcgctgattacaaagatgatgacgataaagccccaaaaaagaagagaaaggtaccgaagaaaaaaagaaaggtc

SEQ ID NO: 1510 - protein, 2149 aa, Synthetic construct
MPKKKRKVPKKKRKVNHDQEFDPPKVYPPVPAEKRKPIRVLSLFDGIATGLLVLKDLGIQVDRYIASEVCEDSITVGMVRHQGKIMYVGDVRSVTQKHIQEWGPFDLVIGGSPCNDLSIVNPARKGLYEGTGRLFFEFYRLLHDARPKEGDDRPFFWLFENVVAMGVSDKRDISRFLESNPVMIDAKEVSAAHRARYFWGNLPGMNRPLASTVNDKLELQECLEHGRIAKFSKVRTITTRSNSIKQGKDQHFPVFMNEKEDILWCTEMERVFGFPVHYTDVSNMSRLARQRLLGRSWSVPVIRHLFAPLKEYFACVSSGNSNANSRGPSFSSGLVPLSLRGSHMGPMEIYKTVSAWKRQPVRVLSLFRNIDKVLKSLGFLESGSGSGGGTLKYVEDVTNVVRRDVEKWGPFDLVYGSTQPLGSSCDRCPGWYMFQFHRILQYALPRQESQRPFFWIFMDNLLLTEDDQETTTRFLQTEAVTLQDVRGRDYQNAMRVWSNIPGLKSKHAPLTPKEEEYLQAQVRSRSKLDAPKVDLLVKNCLLPLREYFKYFSQNSLPLGGPSSGAPPPSGGSPAGSPTSTEEGTSESATPESGPGTSTEPSEGSAPGSPAGSPTSTEEGTSTEPSEGSAPGTSTEPSEMDKKYSIGLAIGTNSVGWAVITDEYKVPSKKFKVLGNTDRHSIKKNLIGALLFDSGETAEATRLKRTARRRYTRRKNRICYLQEIFSNEMAKVDDSFFHRLEESFLVEEDKKHERHPIFGNIVDEVAYHEKYPTIYHLRKKLVDSTDKADLRLIYLALAHMIKFRGHFLIEGDLNPDNSDVDKLFIQLVQTYNQLFEENPINASGVDAKAILSARLSKSRRLENLIAQLPGEKKNGLFGNLIALSLGLTPNFKSNFDLAEDAKLQLSKDTYDDDLDNLLAQIGDQYADLFLAAKNLSDAILLSDILRVNTEITKAPLSASMIKRYDEHHQDLTLLKALVRQQLPEKYKEIFFDQSKNGYAGYIDGGASQEEFYKFIKPILEKMDGTEELLVKLNREDLLRKQRTFDNGSIPHQIHLGELHAILRRQEDFYPFLKDNREKIEKILTFRIPYYVGPLARGNSRFAWMTRKSEETITPWNFEEVVDKGASAQSFIERMTNFDKNLPNEKVLPKHSLLYEYFTVYNELTKVKYVTEGMRKPAFLSGEQKKAIVDLLFKTNRKVTVKQLKEDYFKKIECFDSVEISGVEDRFNASLGTYHDLLKIIKDKDFLDNEENEDILEDIVLTLTLFEDREMIEERLKTYAHLFDDKVMKQLKRRRYTGWGRLSRKLINGIRDKQSGKTILDFLKSDGFANRNFMQLIHDDSLTFKEDIQKAQVSGQGDSLHEHIANLAGSPAIKKGILQTVKVVDELVKVMGRHKPENIVIEMARENQTTQKGQKNSRERMKRIEEGIKELGSQILKEHPVENTQLQNEKLYLYYLQNGRDMYVDQELDINRLSDYDVDAIVPQSFLKDDSIDNKVLTRSDKNRGKSDNVPSEEVVKKMKNYWRQLLNAKLITQRKFDNLTKAERGGLSELDKAGFIKRQLVETRQITKHVAQILDSRMNTKYDENDKLIREVKVITLKSKLVSDFRKDFQFYKVREINNYHHAHDAYLNAVVGTALIKKYPKLESEFVYGDYKVYDVRKMIAKSEQEIGKATAKYFFYSNIMNFFKTEITLANGEIRKRPLIETNGETGEIVWDKGRDFATVRKVLSMPQVNIVKKTEVQTGGFSKESILPKRNSDKLIARKKDWDPKKYGGFDSPTVAYSVLVVAKVEKGKSKKLKSVKELLGITIMERSSFEKNPIDFLEAKGYKEVKKDLIIKLPKYSLFELENGRKRMLASAGELQKGNELALPSKYVNFLYLASHYEKLKGSPEDNEQKQLFVEQHKHYLDEIIEQISEFSKRVILADANLDKVLSAYNKHRDKPIREQAENIIHLFTLTNLGAPAAFKYFDTTIDRKRYTSTKEVLDATLIHQSITGLYETRIDLSQLGGDSGSETPGTSESATPESTGMNNSQGRVTFEDVTVNFTQGEWQRLNPEQRNLYRDVMLENYSNLVSVGQGETTKPDVILRLEQGKEPWLEEEEVLGSGRAEKNGDIGGQIWKPKDVKESLSADYKDDDDKAPKKKRKVPKKKRKV

SEQ ID NO: 1511 - DNA, 6450 bp, Synthetic construct
  source 1..6450: mol_type = other DNA
atgccaaaaaagaagagaaaggtaccgaagaaaaaaagaaaggtatacaaccatgaccaggaattcgaccccccaaaggtttacccacctgtgccagctgagaagaggaagcccatccgcgtgctgtctctctttgatgggattgctacagggctcctggtgctgaaggacctgggcatccaagtggaccgctacattgcctccgaggtgtgtgaggactccatcacggtgggcatggtgcggcaccagggaaagatcatgtacgtcggggacgtccgcagcgtcacacagaagcatatccaggagtggggcccattcgacctggtgattggaggcagtccctgcaatgacctctccattgtcaaccctgcccgcaagggactttatgagggtactggccgcctcttctttgagttctaccgcctcctgcatgatgcgcggcccaaggagggagatgatcgccccttcttctggctctttgagaatgtggtggccatgggcgttagtgacaagagggacatctcgcgatttcttgagtctaaccccgtgatgattgacgccaaagaagtgtctgctgcacacagggcccgttacttctggggtaaccttcctggcatgaacaggcctttggcatccactgtgaatgataagctggagctgcaagagtgtctggagcacggcagaatagccaagttcagcaaagtgaggaccattaccaccaggtcaaactctataaagcagggcaaagaccagcatttccccgtcttcatgaacgagaaggaggacatcctgtggtgcactgaaatggaaagggtgtttggcttccccgtccactacacagacgtctccaacatgagccgcttggcgaggcagagactgctgggccgatcgtggagcgtgccggtcatccgccacctcttcgctccgctgaaggaatattttgcttgtgtgtctagcggcaatagtaacgctaacagccgcgggccgagcttcagcagcggcctggtgccgttaagcttgcgcggcagccatatgggccctatggagatatacaagacagtgtctgcatggaagagacagccagtgcgggtactgagcctcttcagaaacatcgacaaggtactaaagagtttgggcttcttggaaagcggttctggttctgggggaggaacgctgaagtacgtggaagatgtcacaaatgtcgtgaggagagacgtggagaaatggggcccctttgacctggtgtacggctcgacgcagcccctaggcagctcttgtgatcgctgtcccggctggtacatgttccagttccaccggatcctgcagtatgcgctgcctcgccaggagagtcagcggcccttcttctggatattcatggacaatctgctgctgactgaggatgaccaagagacaactacccgcttccttcagacagaggctgtgaccctccaggatgtccgtggcagagactaccagaatgctatgcgggtgtggagcaacattccagggctgaagagcaagcatgcgcccctgaccccaaaggaagaagagtatctgcaagcccaagtcagaagcaggagcaagctggacgccccgaaagttgacctcctggtgaagaactgccttctcccgctgagagagtacttcaagtatttttctcaaaactcacttcctcttggagggccgagctctggcgcacccccaccaagtggagggtctcctgccgggtccccaacatctactgaagaaggcaccagcgaatccgcaacgcccgagtcaggccctggtacctccacagaaccatctgaaggtagtgcgcctggttccccagctggaagccctacttccaccgaagaaggcacgtcaaccgaaccaagtgaaggatctgcccctgggaccagcactgaaccatctgagatggacaagaagtacagcatcggcctggccatcggcaccaactctgtgggctgggccgtgatcaccgacgagtacaaggtgcccagcaagaaattcaaggtgctgggcaacaccgaccggcacagcatcaagaagaacctgatcggcgccctgctgttcgacagcggagaaacagccgaggccacccggctgaagagaaccgccagaagaagatacaccagacggaagaaccggatctgctatctgcaagagatcttcagcaacgagatggccaaggtggacgacagcttcttccacagactggaagagtccttcctggtggaagaggataagaagcacgagcggcaccccatcttcggcaacatcgtggacgaggtggcctaccacgagaagtaccccaccatctaccacctgagaaagaaactggtggacagcaccgacaaggccgacctgcggctgatctatctggccctggcccacatgatcaagttccggggccacttcctgatcgagggcgacctgaaccccgacaacagcgacgtggacaagctgttcatccagctggtgcagacctacaaccagctgttcgaggaaaaccccatcaacgccagcggcgtggacgccaaggccatcctgtctgccagactgagcaagagcagacggctggaaaatctgatcgcccagctgcccggcgagaagaagaatggcctgttcggcaacctgattgccctgagcctgggcctgacccccaacttcaagagcaacttcgacctggccgaggatgccaaactgcagctgagcaaggacacctacgacgacgacctggacaacctgctggcccagatcggcgaccagtacgccgacctgtttctggccgccaagaacctgtccgacgccatcctgctgagcgacatcctgagagtgaacaccgagatcaccaaggcccccctgagcgcctctatgatcaagagatacgacgagcaccaccaggacctgaccctgctgaaagctctcgtgcggcagcagctgcctgagaagtacaaagagattttcttcgaccagagcaagaacggctacgccggctacatcgatggcggagccagccaggaagagttctacaagttcatcaagcccatcctggaaaagatggacggcaccgaggaactgctcgtgaagctgaacagagaggacctgctgcggaagcagcggaccttcgacaacggcagcatcccccaccagatccacctgggagagctgcacgccattctgcggcggcaggaagatttttacccattcctgaaggacaaccgggaaaagatcgagaagatcctgaccttccgcatcccctactacgtgggccctctggccaggggaaacagcagattcgcctggatgaccagaaagagcgaggaaaccatcaccccctggaacttcgaggaagtggtggacaagggcgccagcgcccagagcttcatcgagcggatgaccaacttcgataagaacctgcccaacgagaaggtgctgcccaagcacagcctgctgtacgagtacttcaccgtgtacaacgagctgaccaaagtgaaatacgtgaccgagggaatgagaaagcccgccttcctgagcggcgagcagaaaaaagccatcgtggacctgctgttcaagaccaaccggaaagtgaccgtgaagcagctgaaagaggactacttcaagaaaatcgagtgcttcgactccgtggaaatctccggcgtggaagatcggttcaacgcctccctgggcacataccacgatctgctgaaaattatcaaggacaaggacttcctggacaatgaggaaaacgaggacattctggaagatatcgtgctgaccctgacactgtttgaggacagagagatgatcgaggaacggctgaaaacctatgcccacctgttcgacgacaaagtgatgaagcagctgaagcggcggagatacaccggctggggcaggctgagccggaagctgatcaacggcatccgggacaagcagtccggcaagacaatcctggatttcctgaagtccgacggcttcgccaacagaaacttcatgcagctgatccacgacgacagcctgacctttaaagaggacatccagaaagcccaggtgtccggccagggcgatagcctgcacgagcacattgccaatctggccggcagccccgccattaagaagggcatcctgcagacagtgaaggtggtggacgagctcgtgaaagtgatgggccggcacaagcccgagaacatcgtgatcgaaatggccagagagaaccagaccacccagaagggacagaagaacagccgcgagagaatgaagcggatcgaagagggcatcaaagagctgggcagccagatcctgaaagaacaccccgtggaaaacacccagctgcagaacgagaagctgtacctgtactacctgcagaatgggcgggatatgtacgtggaccaggaactggacatcaaccggctgtccgactacgatgtggacgctatcgtgcctcagagctttctgaaggacgactccatcgataacaaagtgctgactcggagcgacaagaaccggggcaagagcgacaacgtgccctccgaagaggtcgtgaagaagatgaagaactactggcgccagctgctgaatgccaagctgattacccagaggaagttcgacaatctgaccaaggccgagagaggcggcctgagcgaactggataaggccggcttcatcaagagacagctggtggaaacccggcagatcacaaagcacgtggcacagatcctggactcccggatgaacactaagtacgacgagaacgacaaactgatccgggaagtgaaagtgatcaccctgaagtccaagctggtgtccgatttccggaaggatttccagttttacaaagtgcgcgagatcaacaactaccaccacgcccacgacgcctacctgaacgccgtcgtgggaaccgccctgatcaaaaagtaccctaagctggaaagcgagttcgtgtacggcgactacaaggtgtacgacgtgcggaagatgatcgccaagagcgagcaggaaatcggcaaggctaccgccaagtacttcttctacagcaacatcatgaactttttcaagaccgagattaccctggccaacggcgagatccggaagcggcctctgatcgagacaaacggcgaaacaggcgagatcgtgtgggataagggccgggactttgccaccgtgcggaaagtgctgtctatgccccaagtgaatatcgtgaaaaagaccgaggtgcagacaggcggcttcagcaaagagtctatcctgcccaagaggaacagcgacaagctgatcgccagaaagaaggactgggaccctaagaagtacggcggcttcgacagccccaccgtggcctattctgtgctggtggtggccaaagtggaaaagggcaagtccaagaaactgaagagtgtgaaagagctgctggggatcaccatcatggaaagaagcagcttcgagaagaatcccatcgactttctggaagccaagggctacaaagaagtgaaaaaggacctgatcatcaagctgcctaagtactccctgttcgagctggaaaacggccggaagagaatgctggcctctgccggcgaactgcagaagggaaacgaactggccctgccctccaaatatgtgaacttcctgtacctggccagccactatgagaagctgaagggctcccccgaggataatgagcagaaacagctgtttgtggaacagcacaaacactacctggacgagatcatcgagcagatcagcgagttctccaagagagtgatcctggccgacgctaatctggacaaggtgctgagcgcctacaacaagcacagagacaagcctatcagagagcaggccgagaatatcatccacctgtttaccctgaccaatctgggagcccctgccgccttcaagtactttgacaccaccatcgaccggaagaggtacaccagcaccaaagaggtgctggacgccaccctgatccaccagagcatcaccggcctgtacgagacacggatcgacctgtctcagctgggaggcgacagcggaagtgagaccccaggtacatccgaatcagcaacgcctgaaagcaccggtatgaacaattcacaggggagagtgacattcgaagacgtgaccgtgaacttcacccagggagaatggcagcgcttgaacccagaacaaaggaacctctatcgggacgtgatgctggaaaactactcaaatttggtgagcgttgggcagggtgagaccactaagcctgacgtgatcctgagattggaacagggcaaggagccttggctcgaggaagaggaagtcctgggctcagggagggccgagaaaaacggtgatataggaggccagatatggaagcctaaggacgtcaaggagagcctgagcgctgattacaaagatgatgacgataaagccccaaaaaagaagagaaaggtaccgaagaaaaaaagaaaggtc

SEQ ID NO: 1512 - protein, 2129 aa, Synthetic construct
MPKKKRKVPKKKRKVNHDQEFDPPKVYPPVPAEKRKPIRVLSLFDGIATGLLVLKDLGIQVDRYIASEVCEDSITVGMVRHQGKIMYVGDVRSVTQKHIQEWGPFDLVIGGSPCNDLSIVNPARKGLYEGTGRLFFEFYRLLHDARPKEGDDRPFFWLFENVVAMGVSDKRDISRFLESNPVMIDAKEVSAAHRARYFWGNLPGMNRPLASTVNDKLELQECLEHGRIAKFSKVRTITTRSNSIKQGKDQHFPVFMNEKEDILWCTEMERVFGFPVHYTDVSNMSRLARQRLLGRSWSVPVIRHLFAPLKEYFACVSSGNSNANSRGPSFSSGLVPLSLRGSHMGPMEIYKTVSAWKRQPVRVLSLFRNIDKVLKSLGFLESGSGSGGGTLKYVEDVTNVVRRDVEKWGPFDLVYGSTQPLGSSCDRCPGWYMFQFHRILQYALPRQESQRPFFWIFMDNLLLTEDDQETTTRFLQTEAVTLQDVRGRDYQNAMRVWSNIPGLKSKHAPLTPKEEEYLQAQVRSRSKLDAPKVDLLVKNCLLPLREYFKYFSQNSLPLGGPSSGAPPPSGGSPAGSPTSTEEGTSESATPESGPGTSTEPSEGSAPGSPAGSPTSTEEGTSTEPSEGSAPGTSTEPSEMDKKYSIGLAIGTNSVGWAVITDEYKVPSKKFKVLGNTDRHSIKKNLIGALLFDSGETAEATRLKRTARRRYTRRKNRICYLQEIFSNEMAKVDDSFFHRLEESFLVEEDKKHERHPIFGNIVDEVAYHEKYPTIYHLRKKLVDSTDKADLRLIYLALAHMIKFRGHFLIEGDLNPDNSDVDKLFIQLVQTYNQLFEENPINASGVDAKAILSARLSKSRRLENLIAQLPGEKKNGLFGNLIALSLGLTPNFKSNFDLAEDAKLQLSKDTYDDDLDNLLAQIGDQYADLFLAAKNLSDAILLSDILRVNTEITKAPLSASMIKRYDEHHQDLTLLKALVRQQLPEKYKEIFFDQSKNGYAGYIDGGASQEEFYKFIKPILEKMDGTEELLVKLNREDLLRKQRTFDNGSIPHQIHLGELHAILRRQEDFYPFLKDNREKIEKILTFRIPYYVGPLARGNSRFAWMTRKSEETITPWNFEEVVDKGASAQSFIERMTNFDKNLPNEKVLPKHSLLYEYFTVYNELTKVKYVTEGMRKPAFLSGEQKKAIVDLLFKTNRKVTVKQLKEDYFKKIECFDSVEISGVEDRFNASLGTYHDLLKIIKDKDFLDNEENEDILEDIVLTLTLFEDREMIEERLKTYAHLFDDKVMKQLKRRRYTGWGRLSRKLINGIRDKQSGKTILDFLKSDGFANRNFMQLIHDDSLTFKEDIQKAQVSGQGDSLHEHIANLAGSPAIKKGILQTVKVVDELVKVMGRHKPENIVIEMARENQTTQKGQKNSRERMKRIEEGIKELGSQILKEHPVENTQLQNEKLYLYYLQNGRDMYVDQELDINRLSDYDVDAIVPQSFLKDDSIDNKVLTRSDKNRGKSDNVPSEEVVKKMKNYWRQLLNAKLITQRKFDNLTKAERGGLSELDKAGFIKRQLVETRQITKHVAQILDSRMNTKYDENDKLIREVKVITLKSKLVSDFRKDFQFYKVREINNYHHAHDAYLNAVVGTALIKKYPKLESEFVYGDYKVYDVRKMIAKSEQEIGKATAKYFFYSNIMNFFKTEITLANGEIRKRPLIETNGETGEIVWDKGRDFATVRKVLSMPQVNIVKKTEVQTGGFSKESILPKRNSDKLIARKKDWDPKKYGGFDSPTVAYSVLVVAKVEKGKSKKLKSVKELLGITIMERSSFEKNPIDFLEAKGYKEVKKDLIIKLPKYSLFELENGRKRMLASAGELQKGNELALPSKYVNFLYLASHYEKLKGSPEDNEQKQLFVEQHKHYLDEIIEQISEFSKRVILADANLDKVLSAYNKHRDKPIREQAENIIHLFTLTNLGAPAAFKYFDTTIDRKRYTSTKEVLDATLIHQSITGLYETRIDLSQLGGDSGSETPGTSESATPESTGNKKLEAVGTGIEPKAMSQGLVTFGDVAVDFSQEEWEWLNPIQRNLYRKVMLENYRNLASLGLCVSKPDVISSLEQGKEPWSADYKDDDDKAPKKKRKVPKKKRKV

SEQ ID NO: 1513 - DNA, 6390 bp, Synthetic construct
  source 1..6390: mol_type = other DNA
atgccaaaaaagaagagaaaggtaccgaagaaaaaaagaaaggtatacaaccatgaccaggaattcgaccccccaaaggtttacccacctgtgccagctgagaagaggaagcccatccgcgtgctgtctctctttgatgggattgctacagggctcctggtgctgaaggacctgggcatccaagtggaccgctacattgcctccgaggtgtgtgaggactccatcacggtgggcatggtgcggcaccagggaaagatcatgtacgtcggggacgtccgcagcgtcacacagaagcatatccaggagtggggcccattcgacctggtgattggaggcagtccctgcaatgacctctccattgtcaaccctgcccgcaagggactttatgagggtactggccgcctcttctttgagttctaccgcctcctgcatgatgcgcggcccaaggagggagatgatcgccccttcttctggctctttgagaatgtggtggccatgggcgttagtgacaagagggacatctcgcgatttcttgagtctaaccccgtgatgattgacgccaaagaagtgtctgctgcacacagggcccgttacttctggggtaaccttcctggcatgaacaggcctttggcatccactgtgaatgataagctggagctgcaagagtgtctggagcacggcagaatagccaagttcagcaaagtgaggaccattaccaccaggtcaaactctataaagcagggcaaagaccagcatttccccgtcttcatgaacgagaaggaggacatcctgtggtgcactgaaatggaaagggtgtttggcttccccgtccactacacagacgtctccaacatgagccgcttggcgaggcagagactgctgggccgatcgtggagcgtgccggtcatccgccacctcttcgctccgctgaaggaatattttgcttgtgtgtctagcggcaatagtaacgctaacagccgcgggccgagcttcagcagcggcctggtgccgttaagcttgcgcggcagccatatgggccctatggagatatacaagacagtgtctgcatggaagagacagccagtgcgggtactgagcctcttcagaaacatcgacaaggtactaaagagtttgggcttcttggaaagcggttctggttctgggggaggaacgctgaagtacgtggaagatgtcacaaatgtcgtgaggagagacgtggagaaatggggcccctttgacctggtgtacggctcgacgcagcccctaggcagctcttgtgatcgctgtcccggctggtacatgttccagttccaccggatcctgcagtatgcgctgcctcgccaggagagtcagcggcccttcttctggatattcatggacaatctgctgctgactgaggatgaccaagagacaactacccgcttccttcagacagaggctgtgaccctccaggatgtccgtggcagagactaccagaatgctatgcgggtgtggagcaacattccagggctgaagagcaagcatgcgcccctgaccccaaaggaagaagagtatctgcaagcccaagtcagaagcaggagcaagctggacgccccgaaagttgacctcctggtgaagaactgccttctcccgctgagagagtacttcaagtatttttctcaaaactcacttcctcttggagggccgagctctggcgcacccccaccaagtggagggtctcctgccgggtccccaacatctactgaagaaggcaccagcgaatccgcaacgcccgagtcaggccctggtacctccacagaaccatctgaaggtagtgcgcctggttccccagctggaagccctacttccaccgaagaaggcacgtcaaccgaaccaagtgaaggatctgcccctgggaccagcactgaaccatctgagatggacaagaagtacagcatcggcctggccatcggcaccaactctgtgggctgggccgtgatcaccgacgagtacaaggtgcccagcaagaaattcaaggtgctgggcaacaccgaccggcacagcatcaagaagaacctgatcggcgccctgctgttcgacagcggagaaacagccgaggccacccggctgaagagaaccgccagaagaagatacaccagacggaagaaccggatctgctatctgcaagagatcttcagcaacgagatggccaaggtggacgacagcttcttccacagactggaagagtccttcctggtggaagaggataagaagcacgagcggcaccccatcttcggcaacatcgtggacgaggtggcctaccacgagaagtaccccaccatctaccacctgagaaagaaactggtggacagcaccgacaaggccgacctgcggctgatctatctggccctggcccacatgatcaagttccggggccacttcctgatcgagggcgacctgaaccccgacaacagcgacgtggacaagctgttcatccagctggtgcagacctacaaccagctgttcgaggaaaaccccatcaacgccagcggcgtggacgccaaggccatcctgtctgccagactgagcaagagcagacggctggaaaatctgatcgcccagctgcccggcgagaagaagaatggcctgttcggcaacctgattgccctgagcctgggcctgacccccaacttcaagagcaacttcgacctggccgaggatgccaaactgcagctgagcaaggacacctacgacgacgacctggacaacctgctggcccagatcggcgaccagtacgccgacctgtttctggccgccaagaacctgtccgacgccatcctgctgagcgacatcctgagagtgaacaccgagatcaccaaggcccccctgagcgcctctatgatcaagagatacgacgagcaccaccaggacctgaccctgctgaaagctctcgtgcggcagcagctgcctgagaagtacaaagagattttcttcgaccagagcaagaacggctacgccggctacatcgatggcggagccagccaggaagagttctacaagttcatcaagcccatcctggaaaagatggacggcaccgaggaactgctcgtgaagctgaacagagaggacctgctgcggaagcagcggaccttcgacaacggcagcatcccccaccagatccacctgggagagctgcacgccattctgcggcggcaggaagatttttacccattcctgaaggacaaccgggaaaagatcgagaagatcctgaccttccgcatcccctactacgtgggccctctggccaggggaaacagcagattcgcctggatgaccagaaagagcgaggaaaccatcaccccctggaacttcgaggaagtggtggacaagggcgccagcgcccagagcttcatcgagcggatgaccaacttcgataagaacctgcccaacgagaaggtgctgcccaagcacagcctgctgtacgagtacttcaccgtgtacaacgagctgaccaaagtgaaatacgtgaccgagggaatgagaaagcccgccttcctgagcggcgagcagaaaaaagccatcgtggacctgctgttcaagaccaaccggaaagtgaccgtgaagcagctgaaagaggactacttcaagaaaatcgagtgcttcgactccgtggaaatctccggcgtggaagatcggttcaacgcctccctgggcacataccacgatctgctgaaaattatcaaggacaaggacttcctggacaatgaggaaaacgaggacattctggaagatatcgtgctgaccctgacactgtttgaggacagagagatgatcgaggaacggctgaaaacctatgcccacctgttcgacgacaaagtgatgaagcagctgaagcggcggagatacaccggctggggcaggctgagccggaagctgatcaacggcatccgggacaagcagtccggcaagacaatcctggatttcctgaagtccgacggcttcgccaacagaaacttcatgcagctgatccacgacgacagcctgacctttaaagaggacatccagaaagcccaggtgtccggccagggcgatagcctgcacgagcacattgccaatctggccggcagccccgccattaagaagggcatcctgcagacagtgaaggtggtggacgagctcgtgaaagtgatgggccggcacaagcccgagaacatcgtgatcgaaatggccagagagaaccagaccacccagaagggacagaagaacagccgcgagagaatgaagcggatcgaagagggcatcaaagagctgggcagccagatcctgaaagaacaccccgtggaaaacacccagctgcagaacgagaagctgtacctgtactacctgcagaatgggcgggatatgtacgtggaccaggaactggacatcaaccggctgtccgactacgatgtggacgctatcgtgcctcagagctttctgaaggacgactccatcgataacaaagtgctgactcggagcgacaagaaccggggcaagagcgacaacgtgccctccgaagaggtcgtgaagaagatgaagaactactggcgccagctgctgaatgccaagctgattacccagaggaagttcgacaatctgaccaaggccgagagaggcggcctgagcgaactggataaggccggcttcatcaagagacagctggtggaaacccggcagatcacaaagcacgtggcacagatcctggactcccggatgaacactaagtacgacgagaacgacaaactgatccgggaagtgaaagtgatcaccctgaagtccaagctggtgtccgatttccggaaggatttccagttttacaaagtgcgcgagatcaacaactaccaccacgcccacgacgcctacctgaacgccgtcgtgggaaccgccctgatcaaaaagtaccctaagctggaaagcgagttcgtgtacggcgactacaaggtgtacgacgtgcggaagatgatcgccaagagcgagcaggaaatcggcaaggctaccgccaagtacttcttctacagcaacatcatgaactttttcaagaccgagattaccctggccaacggcgagatccggaagcggcctctgatcgagacaaacggcgaaacaggcgagatcgtgtgggataagggccgggactttgccaccgtgcggaaagtgctgtctatgccccaagtgaatatcgtgaaaaagaccgaggtgcagacaggcggcttcagcaaagagtctatcctgcccaagaggaacagcgacaagctgatcgccagaaagaaggactgggaccctaagaagtacggcggcttcgacagccccaccgtggcctattctgtgctggtggtggccaaagtggaaaagggcaagtccaagaaactgaagagtgtgaaagagctgctggggatcaccatcatggaaagaagcagcttcgagaagaatcccatcgactttctggaagccaagggctacaaagaagtgaaaaaggacctgatcatcaagctgcctaagtactccctgttcgagctggaaaacggccggaagagaatgctggcctctgccggcgaactgcagaagggaaacgaactggccctgccctccaaatatgtgaacttcctgtacctggccagccactatgagaagctgaagggctcccccgaggataatgagcagaaacagctgtttgtggaacagcacaaacactacctggacgagatcatcgagcagatcagcgagttctccaagagagtgatcctggccgacgctaatctggacaaggtgctgagcgcctacaacaagcacagagacaagcctatcagagagcaggccgagaatatcatccacctgtttaccctgaccaatctgggagcccctgccgccttcaagtactttgacaccaccatcgaccggaagaggtacaccagcaccaaagaggtgctggacgccaccctgatccaccagagcatcaccggcctgtacgagacacggatcgacctgtctcagctgggaggcgacagcggaagtgagaccccaggtacatccgaatcagcaacgcctgaaagcaccggtaacaaaaagcttgaggccgtcggaaccggaatcgaaccaaaagcaatgtcccagggtttggtgacatttggcgacgtggctgtcgatttttcccaggaagagtgggagtggctcaatcctatccagaggaacttgtaccggaaggtgatgctggagaattatagaaatttggcatcactggggttgtgcgttagcaaaccagatgttatatcttccctggaacagggaaaggagccctggagcgctgattacaaagatgatgacgataaagccccaaaaaagaagagaaaggtaccgaagaaaaaaagaaaggtc

SEQ ID NO: 1514 - protein, 2298 aa, Synthetic construct; identical to SEQ ID NO: 660

SEQ ID NO: 1515 - DNA, 6897 bp, Synthetic construct
  source 1..6897: mol_type = other DNA
atgggtaccatgccaaaaaagaagagaaaggtaccgaagaaaaaaagaaaggtatacaatcacgatcaggagttcgacccccctaaggtgtacccaccagtgcctgcagagaagaggaagccaatccgggtgctgagcctgtttgatggcatcgccaccggcctgctggtgctgaaggatctgggcatccaggtggaccggtacatcgcctccgaggtgtgcgaggattctatcaccgtgggcatggtgcgccaccagggcaagatcatgtatgtgggcgacgtgcggtccgtgacacagaagcacatccaggagtggggcccattcgatctggtgatcggcggcagcccctgtaatgacctgtccatcgtgaaccctgcaaggaagggactgtacgagggaaccggccggctgttctttgagttttatagactgctgcacgacgccaggcctaaggagggcgacgatagaccattcttttggctgttcgagaatgtggtggctatgggcgtgagcgataagagggacatctccaggtttctggagtctaaccccgtgatgatcgatgcaaaggaggtgtccgccgcacacagagccaggtatttctggggcaatctgccaggaatgaacaggccactggcaagcaccgtgaatgacaagctggagctgcaggagtgcctggagcacggaaggatcgccaagttttccaaggtgcgcacaatcaccacacggagcaattccatcaagcagggcaaggatcagcacttccccgtgttcatgaacgagaaggaggacatcctgtggtgtaccgagatggagagagtgttcggctttccagtgcactacacagacgtgtctaacatgagcaggctggcaaggcagcggctgctgggcagatcttggagcgtgcccgtgatcaggcacctgttcgcccctctgaaggagtattttgcctgcgtgagcagcggcaactccaatgccaacagccggggcccctctttcagctccggattggtgcctctgagcctgaggggctcccacatggcagcaatccccgccctggaccccgaggccgagcctagcatggacgtgatcctggtgggctctagcgagctgtcctctagcgtgtctccaggaaccggaagggatctgatcgcatacgaggtgaaggccaatcagcggaacatcgaggacatctgtatctgctgtggcagcctgcaggtgcacacacagcacccactgttcgagggaggaatctgcgcaccctgtaaggataagttcctggacgccctgtttctgtacgacgatgacggctaccagtcctattgctctatctgctgttccggcgagaccctgctgatctgcggcaatccagattgtacaaggtgctattgttttgagtgcgtggactctctggtgggaccaggcaccagcggaaaggtgcacgccatgtccaactgggtgtgctacctgtgcctgccatcctctcgcagcggactgctgcagcggagaaggaagtggagatcccagctgaaggccttctatgatagggagtctgagaaccccctggagatgtttgagaccgtgccagtgtggcgccggcagcccgtgagggtgctgagcctgttcgaggatatcaagaaggagctgacatccctgggctttctggagtccggctctgaccccggacagctgaagcacgtggtggatgtgaccgacacagtgcggaaggatgtggaggagtggggccctttcgacctggtgtacggagcaacccctccactgggacacacatgcgacagacccccttcttggtacctgttccagtttcaccgcctgctgcagtatgcaaggccaaagccaggcagccctagaccattcttttggatgttcgtggataatctggtgctgaacaaggaggatctggacgtggccagcaggtttctggagatggagccagtgaccatcccagacgtgcacggcggctccctgcagaatgccgtgcgcgtgtggtctaacatccctgccatcagaagcaggcactgggcactggtgagcgaggaggagctgtccctgctggcccagaataagcagagcagcaagctggccgccaagtggcctacaaagctggtgaagaactgcttcctgccactgcgggagtacttcaagtatttttccaccgagctgacatctagcctgggaggaccctcctctggcgccccaccacctagcggcggctcccctgccggctctccaaccagcacagaggagggcaccagcgagtccgccacaccagagtctggacctggcaccagcacagagccatccgagggctctgccccaggctctcctgcaggcagccctacctccaccgaagagggcaccagcacagagccttctgagggcagcgccccaggcacctctacagagccaagcgagctcgaggacaagaagtacagcatcggcctggccatcggcaccaactctgtgggctgggccgtgatcaccgacgagtacaaggtgcccagcaagaaattcaaggtgctgggcaacaccgaccggcacagcatcaagaagaacctgatcggagccctgctgttcgacagcggcgaaacagccgaggccacccggctgaagagaaccgccagaagaagatacaccagacggaagaaccggatctgctatctgcaagagatcttcagcaacgagatggccaaggtggacgacagcttcttccacagactggaagagtccttcctggtggaagaggataagaagcacgagcggcaccccatcttcggcaacatcgtggacgaggtggcctaccacgagaagtaccccaccatctaccacctgagaaagaaactggtggacagcaccgacaaggccgacctgcggctgatctatctggccctggcccacatgatcaagttccggggccacttcctgatcgagggcgacctgaaccccgacaacagcgacgtggacaagctgttcatccagctggtgcagacctacaaccagctgttcgaggaaaaccccatcaacgccagcggcgtggacgccaaggccatcctgtctgccagactgagcaagagcagacggctggaaaatctgatcgcccagctgcccggcgagaagaagaatggcctgttcggcaacctgattgccctgagcctgggcctgacccccaacttcaagagcaacttcgacctggccgaggatgccaaactgcagctgagcaaggacacctacgacgacgacctggacaacctgctggcccagatcggcgaccagtacgccgacctgtttctggccgccaagaacctgtccgacgccatcctgctgagcgacatcctgagagtgaacaccgagatcaccaaggcccccctgagcgcctctatgatcaagagatacgacgagcaccaccaggacctgaccctgctgaaagctctcgtgcggcagcagctgcctgagaagtacaaagagattttcttcgaccagagcaagaacggctacgccggctacattgacggcggagccagccaggaagagttctacaagttcatcaagcccatcctggaaaagatggacggcaccgaggaactgctcgtgaagctgaacagagaggacctgctgcggaagcagcggaccttcgacaacggcagcatcccccaccagatccacctgggagagctgcacgccattctgcggcggcaggaagatttttacccattcctgaaggacaaccgggaaaagatcgagaagatcctgaccttccgcatcccctactacgtgggccctctggccaggggaaacagcagattcgcctggatgaccagaaagagcgaggaaaccatcaccccctggaacttcgaggaagtggtggacaagggcgcttccgcccagagcttcatcgagcggatgaccaacttcgataagaacctgcccaacgagaaggtgctgcccaagcacagcctgctgtacgagtacttcaccgtgtataacgagctgaccaaagtgaaatacgtgaccgagggaatgagaaagcccgccttcctgagcggcgagcagaaaaaggccatcgtggacctgctgttcaagaccaaccggaaagtgaccgtgaagcagctgaaagaggactacttcaagaaaatcgagtgcttcgactccgtggaaatctccggcgtggaagatcggttcaacgcctccctgggcacataccacgatctgctgaaaattatcaaggacaaggacttcctggacaatgaggaaaacgaggacattctggaagatatcgtgctgaccctgacactgtttgaggacagagagatgatcgaggaacggctgaaaacctatgcccacctgttcgacgacaaagtgatgaagcagctgaagcggcggagatacaccggctggggcaggctgagccggaagctgatcaacggcatccgggacaagcagtccggcaagacaatcctggatttcctgaagtccgacggcttcgccaacagaaacttcatgcagctgatccacgacgacagcctgacctttaaagaggacatccagaaagcccaggtgtccggccagggcgatagcctgcacgagcacattgccaatctggccggcagccccgccattaagaagggcatcctgcagacagtgaaggtggtggacgagctcgtgaaagtgatgggccggcacaagcccgagaacatcgtgatcgaaatggccagagagaaccagaccacccagaagggacagaagaacagccgcgagagaatgaagcggatcgaagagggcatcaaagagctgggcagccagatcctgaaagaacaccccgtggaaaacacccagctgcagaacgagaagctgtacctgtactacctgcagaatgggcgggatatgtacgtggaccaggaactggacatcaaccggctgtccgactacgatgtggacgccatcgtgcctcagagctttctgaaggacgactccatcgacaacaaggtgctgaccagaagcgacaagaaccggggcaagagcgacaacgtgccctccgaagaggtcgtgaagaagatgaagaactactggcggcagctgctgaacgccaagctgattacccagagaaagttcgacaatctgaccaaggccgagagaggcggcctgagcgaactggataaggccggcttcatcaagagacagctggtggaaacccggcagatcacaaagcacgtggcacagatcctggactcccggatgaacactaagtacgacgagaatgacaagctgatccgggaagtgaaagtgatcaccctgaagtccaagctggtgtccgatttccggaaggatttccagttttacaaagtgcgcgagatcaacaactaccaccacgcccacgacgcctacctgaacgccgtcgtgggaaccgccctgatcaaaaagtaccctaagctggaaagcgagttcgtgtacggcgactacaaggtgtacgacgtgcggaagatgatcgccaagagcgagcaggaaatcggcaaggctaccgccaagtacttcttctacagcaacatcatgaactttttcaagaccgagattaccctggccaacggcgagatccggaagcggcctctgatcgagacaaacggcgaaaccggggagatcgtgtgggataagggccgggattttgccaccgtgcggaaagtgctgagcatgccccaagtgaatatcgtgaaaaagaccgaggtgcagacaggcggcttcagcaaagagtctatcctgcccaagaggaacagcgataagctgatcgccagaaagaaggactgggaccctaagaagtacggcggcttcgacagccccaccgtggcctattctgtgctggtggtggccaaagtggaaaagggcaagtccaagaaactgaagagtgtgaaagagctgctggggatcaccatcatggaaagaagcagcttcgagaagaatcccatcgactttctggaagccaagggctacaaagaagtgaaaaaggacctgatcatcaagctgcctaagtactccctgttcgagctggaaaacggccggaagagaatgctggcctctgccggcgaactgcagaagggaaacgaactggccctgccctccaaatatgtgaacttcctgtacctggccagccactatgagaagctgaagggctcccccgaggataatgagcagaaacagctgtttgtggaacagcacaagcactacctggacgagatcatcgagcagatcagcgagttctccaagagagtgatcctggccgacgctaatctggacaaagtgctgtccgcctacaacaagcaccgggataagcccatcagagagcaggccgagaatatcatccacctgtttaccctgaccaatctgggagcccctgccgccttcaagtactttgacaccaccatcgaccggaagaggtacaccagcaccaaagaggtgctggacgccaccctgatccaccagagcatcaccggcctgtacgagacacggatcgacctgtctcagctgggaggcgacagccccaagaagaagagaaaggtgggagtcgacggatccagcggctccgagaccccaggcacatctgagagcgccacccctgagtcccggaccctggtgaccttcaaggatgtatttgtggacttcaccagggaggagtggaagctgctggacactgctcagcagatcgtgtacagaaatgtgatgctggagaactataagaacctggtttccttgggttatcagcttactaagccagatgtgatcctccggttggagaagggagaagagcccagcgctgattacaaagatgatgacgataaagccccaaaaaagaagagaaaggtaccgaagaaaaaaagaaaggtctga

SEQ ID NO: 1516 - protein, 2318 aa, Synthetic construct; identical to SEQ ID NO: 661

SEQ ID NO: 1517 - DNA, 6957 bp, Synthetic construct
  source 1..6957: mol_type = other DNA
atgggtaccatgccaaaaaagaagagaaaggtaccgaagaaaaaaagaaaggtatacaatcacgatcaggagttcgacccccctaaggtgtacccaccagtgcctgcagagaagaggaagccaatccgggtgctgagcctgtttgatggcatcgccaccggcctgctggtgctgaaggatctgggcatccaggtggaccggtacatcgcctccgaggtgtgcgaggattctatcaccgtgggcatggtgcgccaccagggcaagatcatgtatgtgggcgacgtgcggtccgtgacacagaagcacatccaggagtggggcccattcgatctggtgatcggcggcagcccctgtaatgacctgtccatcgtgaaccctgcaaggaagggactgtacgagggaaccggccggctgttctttgagttttatagactgctgcacgacgccaggcctaaggagggcgacgatagaccattcttttggctgttcgagaatgtggtggctatgggcgtgagcgataagagggacatctccaggtttctggagtctaaccccgtgatgatcgatgcaaaggaggtgtccgccgcacacagagccaggtatttctggggcaatctgccaggaatgaacaggccactggcaagcaccgtgaatgacaagctggagctgcaggagtgcctggagcacggaaggatcgccaagttttccaaggtgcgcacaatcaccacacggagcaattccatcaagcagggcaaggatcagcacttccccgtgttcatgaacgagaaggaggacatcctgtggtgtaccgagatggagagagtgttcggctttccagtgcactacacagacgtgtctaacatgagcaggctggcaaggcagcggctgctgggcagatcttggagcgtgcccgtgatcaggcacctgttcgcccctctgaaggagtattttgcctgcgtgagcagcggcaactccaatgccaacagccggggcccctctttcagctccggattggtgcctctgagcctgaggggctcccacatggcagcaatccccgccctggaccccgaggccgagcctagcatggacgtgatcctggtgggctctagcgagctgtcctctagcgtgtctccaggaaccggaagggatctgatcgcatacgaggtgaaggccaatcagcggaacatcgaggacatctgtatctgctgtggcagcctgcaggtgcacacacagcacccactgttcgagggaggaatctgcgcaccctgtaaggataagttcctggacgccctgtttctgtacgacgatgacggctaccagtcctattgctctatctgctgttccggcgagaccctgctgatctgcggcaatccagattgtacaaggtgctattgttttgagtgcgtggactctctggtgggaccaggcaccagcggaaaggtgcacgccatgtccaactgggtgtgctacctgtgcctgccatcctctcgcagcggactgctgcagcggagaaggaagtggagatcccagctgaaggccttctatgatagggagtctgagaaccccctggagatgtttgagaccgtgccagtgtggcgccggcagcccgtgagggtgctgagcctgttcgaggatatcaagaaggagctgacatccctgggctttctggagtccggctctgaccccggacagctgaagcacgtggtggatgtgaccgacacagtgcggaaggatgtggaggagtggggccctttcgacctggtgtacggagcaacccctccactgggacacacatgcgacagacccccttcttggtacctgttccagtttcaccgcctgctgcagtatgcaaggccaaagccaggcagccctagaccattcttttggatgttcgtggataatctggtgctgaacaaggaggatctggacgtggccagcaggtttctggagatggagccagtgaccatcccagacgtgcacggcggctccctgcagaatgccgtgcgcgtgtggtctaacatccctgccatcagaagcaggcactgggcactggtgagcgaggaggagctgtccctgctggcccagaataagcagagcagcaagctggccgccaagtggcctacaaagctggtgaagaactgcttcctgccactgcgggagtacttcaagtatttttccaccgagctgacatctagcctgggaggaccctcctctggcgccccaccacctagcggcggctcccctgccggctctccaaccagcacagaggagggcaccagcgagtccgccacaccagagtctggacctggcaccagcacagagccatccgagggctctgccccgggctctcctgcaggcagccctacctccaccgaagagggcaccagcacagagccttctgagggcagcgccccaggcacctctacagagccaagcgagctcgaggacaagaagtacagcatcggcctggccatcggcaccaactctgtgggctgggccgtgatcaccgacgagtacaaggtgcccagcaagaaattcaaggtgctgggcaacaccgaccggcacagcatcaagaagaacctgatcggagccctgctgttcgacagcggcgaaacagccgaggccacccggctgaagagaaccgccagaagaagatacaccagacggaagaaccggatctgctatctgcaagagatcttcagcaacgagatggccaaggtggacgacagcttcttccacagactggaagagtccttcctggtggaagaggataagaagcacgagcggcaccccatcttcggcaacatcgtggacgaggtggcctaccacgagaagtaccccaccatctaccacctgagaaagaaactggtggacagcaccgacaaggccgacctgcggctgatctatctggccctggcccacatgatcaagttccggggccacttcctgatcgagggcgacctgaaccccgacaacagcgacgtggacaagctgttcatccagctggtgcagacctacaaccagctgttcgaggaaaaccccatcaacgccagcggcgtggacgccaaggccatcctgtctgccagactgagcaagagcagacggctggaaaatctgatcgcccagctgcccggcgagaagaagaatggcctgttcggcaacctgattgccctgagcctgggcctgacccccaacttcaagagcaacttcgacctggccgaggatgccaaactgcagctgagcaaggacacctacgacgacgacctggacaacctgctggcccagatcggcgaccagtacgccgacctgtttctggccgccaagaacctgtccgacgccatcctgctgagcgacatcctgagagtgaacaccgagatcaccaaggcccccctgagcgcctctatgatcaagagatacgacgagcaccaccaggacctgaccctgctgaaagctctcgtgcggcagcagctgcctgagaagtacaaagagattttcttcgaccagagcaagaacggctacgccggctacattgacggcggagccagccaggaagagttctacaagttcatcaagcccatcctggaaaagatggacggcaccgaggaactgctcgtgaagctgaacagagaggacctgctgcggaagcagcggaccttcgacaacggcagcatcccccaccagatccacctgggagagctgcacgccattctgcggcggcaggaagatttttacccattcctgaaggacaaccgggaaaagatcgagaagatcctgaccttccgcatcccctactacgtgggccctctggccaggggaaacagcagattcgcctggatgaccagaaagagcgaggaaaccatcaccccctggaacttcgaggaagtggtggacaagggcgcttccgcccagagcttcatcgagcggatgaccaacttcgataagaacctgcccaacgagaaggtgctgcccaagcacagcctgctgtacgagtacttcaccgtgtataacgagctgaccaaagtgaaatacgtgaccgagggaatgagaaagcccgccttcctgagcggcgagcagaaaaaggccatcgtggacctgctgttcaagaccaaccggaaagtgaccgtgaagcagctgaaagaggactacttcaagaaaatcgagtgcttcgactccgtggaaatctccggcgtggaagatcggttcaacgcctccctgggcacataccacgatctgctgaaaattatcaaggacaaggacttcctggacaatgaggaaaacgaggacattctggaagatatcgtgctgaccctgacactgtttgaggacagagagatgatcgaggaacggctgaaaacctatgcccacctgttcgacgacaaagtgatgaagcagctgaagcggcggagatacaccggctggggcaggctgagccggaagctgatcaacggcatccgggacaagcagtccggcaagacaatcctggatttcctgaagtccgacggcttcgccaacagaaacttcatgcagctgatccacgacgacagcctgacctttaaagaggacatccagaaagcccaggtgtccggccagggcgatagcctgcacgagcacattgccaatctggccggcagccccgccattaagaagggcatcctgcagacagtgaaggtggtggacgagctcgtgaaagtgatgggccggcacaagcccgagaacatcgtgatcgaaatggccagagagaaccagaccacccagaagggacagaagaacagccgcgagagaatgaagcggatcgaagagggcatcaaagagctgggcagccagatcctgaaagaacaccccgtggaaaacacccagctgcagaacgagaagctgtacctgtactacctgcagaatgggcgggatatgtacgtggaccaggaactggacatcaaccggctgtccgactacgatgtggacgccatcgtgcctcagagctttctgaaggacgactccatcgacaacaaggtgctgaccagaagcgacaagaaccggggcaagagcgacaacgtgccctccgaagaggtcgtgaagaagatgaagaactactggcggcagctgctgaacgccaagctgattacccagagaaagttcgacaatctgaccaaggccgagagaggcggcctgagcgaactggataaggccggcttcatcaagagacagctggtggaaacccggcagatcacaaagcacgtggcacagatcctggactcccggatgaacactaagtacgacgagaatgacaagctgatccgggaagtgaaagtgatcaccctgaagtccaagctggtgtccgatttccggaaggatttccagttttacaaagtgcgcgagatcaacaactaccaccacgcccacgacgcctacctgaacgccgtcgtgggaaccgccctgatcaaaaagtaccctaagctggaaagcgagttcgtgtacggcgactacaaggtgtacgacgtgcggaagatgatcgccaagagcgagcaggaaatcggcaaggctaccgccaagtacttcttctacagcaacatcatgaactttttcaagaccgagattaccctggccaacggcgagatccggaagcggcctctgatcgagacaaacggcgaaaccggggagatcgtgtgggataagggccgggattttgccaccgtgcggaaagtgctgagcatgccccaagtgaatatcgtgaaaaagaccgaggtgcagacaggcggcttcagcaaagagtctatcctgcccaagaggaacagcgataagctgatcgccagaaagaaggactgggaccctaagaagtacggcggcttcgacagccccaccgtggcctattctgtgctggtggtggccaaagtggaaaagggcaagtccaagaaactgaagagtgtgaaagagctgctggggatcaccatcatggaaagaagcagcttcgagaagaatcccatcgactttctggaagccaagggctacaaagaagtgaaaaaggacctgatcatcaagctgcctaagtactccctgttcgagctggaaaacggccggaagagaatgctggcctctgccggcgaactgcagaagggaaacgaactggccctgccctccaaatatgtgaacttcctgtacctggccagccactatgagaagctgaagggctcccccgaggataatgagcagaaacagctgtttgtggaacagcacaagcactacctggacgagatcatcgagcagatcagcgagttctccaagagagtgatcctggccgacgctaatctggacaaagtgctgtccgcctacaacaagcaccgggataagcccatcagagagcaggccgagaatatcatccacctgtttaccctgaccaatctgggagcccctgccgccttcaagtactttgacaccaccatcgaccggaagaggtacaccagcaccaaagaggtgctggacgccaccctgatccaccagagcatcaccggcctgtacgagacacggatcgacctgtctcagctgggaggcgacagccccaagaagaagagaaaggtgggagtcgacggatccagcggctccgagaccccaggcacatctgagagcgccacccctgagtccaccggtaacaaaaagcttgaggccgtcggaaccggaatcgaaccaaaagcaatgtcccagggtttggtgacatttggcgacgtggctgtcgatttttcccaggaagagtgggagtggctcaatcctatccagaggaacttgtaccggaaggtgatgctggagaattatagaaatttggcatcactggggttgtgcgttagcaaaccagatgttatatcttccctggaacagggaaaggagccctggagcgctgattacaaagatgatgacgataaagcccccaagaagaaaaggaaggtcccaaagaaaaaaagaaaggtgtga

SEQ ID NO: 1518 - protein, 2338 aa, Synthetic construct; identical to SEQ ID NO: 663

SEQ ID NO: 1519 - DNA, 7017 bp, Synthetic construct
  source 1..7017: mol_type = other DNA
atgggtaccatgccaaaaaagaagagaaaggtaccgaagaaaaaaagaaaggtatacaatcacgatcaggagttcgacccccctaaggtgtacccaccagtgcctgcagagaagaggaagccaatccgggtgctgagcctgtttgatggcatcgccaccggcctgctggtgctgaaggatctgggcatccaggtggaccggtacatcgcctccgaggtgtgcgaggattctatcaccgtgggcatggtgcgccaccagggcaagatcatgtatgtgggcgacgtgcggtccgtgacacagaagcacatccaggagtggggcccattcgatctggtgatcggcggcagcccctgtaatgacctgtccatcgtgaaccctgcaaggaagggactgtacgagggaaccggccggctgttctttgagttttatagactgctgcacgacgccaggcctaaggagggcgacgatagaccattcttttggctgttcgagaatgtggtggctatgggcgtgagcgataagagggacatctccaggtttctggagtctaaccccgtgatgatcgatgcaaaggaggtgtccgccgcacacagagccaggtatttctggggcaatctgccaggaatgaacaggccactggcaagcaccgtgaatgacaagctggagctgcaggagtgcctggagcacggaaggatcgccaagttttccaaggtgcgcacaatcaccacacggagcaattccatcaagcagggcaaggatcagcacttccccgtgttcatgaacgagaaggaggacatcctgtggtgtaccgagatggagagagtgttcggctttccagtgcactacacagacgtgtctaacatgagcaggctggcaaggcagcggctgctgggcagatcttggagcgtgcccgtgatcaggcacctgttcgcccctctgaaggagtattttgcctgcgtgagcagcggcaactccaatgccaacagccggggcccctctttcagctccggattggtgcctctgagcctgaggggctcccacatggcagcaatccccgccctggaccccgaggccgagcctagcatggacgtgatcctggtgggctctagcgagctgtcctctagcgtgtctccaggaaccggaagggatctgatcgcatacgaggtgaaggccaatcagcggaacatcgaggacatctgtatctgctgtggcagcctgcaggtgcacacacagcacccactgttcgagggaggaatctgcgcaccctgtaaggataagttcctggacgccctgtttctgtacgacgatgacggctaccagtcctattgctctatctgctgttccggcgagaccctgctgatctgcggcaatccagattgtacaaggtgctattgttttgagtgcgtggactctctggtgggaccaggcaccagcggaaaggtgcacgccatgtccaactgggtgtgctacctgtgcctgccatcctctcgcagcggactgctgcagcggagaaggaagtggagatcccagctgaaggccttctatgatagggagtctgagaaccccctggagatgtttgagaccgtgccagtgtggcgccggcagcccgtgagggtgctgagcctgttcgaggatatcaagaaggagctgacatccctgggctttctggagtccggctctgaccccggacagctgaagcacgtggtggatgtgaccgacacagtgcggaaggatgtggaggagtggggccctttcgacctggtgtacggagcaacccctccactgggacacacatgcgacagacccccttcttggtacctgttccagtttcaccgcctgctgcagtatgcaaggccaaagccaggcagccctagaccattcttttggatgttcgtggataatctggtgctgaacaaggaggatctggacgtggccagcaggtttctggagatggagccagtgaccatcccagacgtgcacggcggctccctgcagaatgccgtgcgcgtgtggtctaacatccctgccatcagaagcaggcactgggcactggtgagcgaggaggagctgtccctgctggcccagaataagcagagcagcaagctggccgccaagtggcctacaaagctggtgaagaactgcttcctgccactgcgggagtacttcaagtatttttccaccgagctgacatctagcctgggaggaccctcctctggcgccccaccacctagcggcggctcccctgccggctctccaaccagcacagaggagggcaccagcgagtccgccacaccagagtctggacctggcaccagcacagagccatccgagggctctgccccaggctctcctgcaggcagccctacctccaccgaagagggcaccagcacagagccttctgagggcagcgccccaggcacctctacagagccaagcgagctcgaggacaagaagtacagcatcggcctggccatcggcaccaactctgtgggctgggccgtgatcaccgacgagtacaaggtgcccagcaagaaattcaaggtgctgggcaacaccgaccggcacagcatcaagaagaacctgatcggagccctgctgttcgacagcggcgaaacagccgaggccacccggctgaagagaaccgccagaagaagatacaccagacggaagaaccggatctgctatctgcaagagatcttcagcaacgagatggccaaggtggacgacagcttcttccacagactggaagagtccttcctggtggaagaggataagaagcacgagcggcaccccatcttcggcaacatcgtggacgaggtggcctaccacgagaagtaccccaccatctaccacctgagaaagaaactggtggacagcaccgacaaggccgacctgcggctgatctatctggccctggcccacatgatcaagttccggggccacttcctgatcgagggcgacctgaaccccgacaacagcgacgtggacaagctgttcatccagctggtgcagacctacaaccagctgttcgaggaaaaccccatcaacgccagcggcgtggacgccaaggccatcctgtctgccagactgagcaagagcagacggctggaaaatctgatcgcccagctgcccggcgagaagaagaatggcctgttcggcaacctgattgccctgagcctgggcctgacccccaacttcaagagcaacttcgacctggccgaggatgccaaactgcagctgagcaaggacacctacgacgacgacctggacaacctgctggcccagatcggcgaccagtacgccgacctgtttctggccgccaagaacctgtccgacgccatcctgctgagcgacatcctgagagtgaacaccgagatcaccaaggcccccctgagcgcctctatgatcaagagatacgacgagcaccaccaggacctgaccctgctgaaagctctcgtgcggcagcagctgcctgagaagtacaaagagattttcttcgaccagagcaagaacggctacgccggctacattgacggcggagccagccaggaagagttctacaagttcatcaagcccatcctggaaaagatggacggcaccgaggaactgctcgtgaagctgaacagagaggacctgctgcggaagcagcggaccttcgacaacggcagcatcccccaccagatccacctgggagagctgcacgccattctgcggcggcaggaagatttttacccattcctgaaggacaaccgggaaaagatcgagaagatcctgaccttccgcatcccctactacgtgggccctctggccaggggaaacagcagattcgcctggatgaccagaaagagcgaggaaaccatcaccccctggaacttcgaggaagtggtggacaagggcgcttccgcccagagcttcatcgagcggatgaccaacttcgataagaacctgcccaacgagaaggtgctgcccaagcacagcctgctgtacgagtacttcaccgtgtataacgagctgaccaaagtgaaatacgtgaccgagggaatgagaaagcccgccttcctgagcggcgagcagaaaaaggccatcgtggacctgctgttcaagaccaaccggaaagtgaccgtgaagcagctgaaagaggactacttcaagaaaatcgagtgcttcgactccgtggaaatctccggcgtggaagatcggttcaacgcctccctgggcacataccacgatctgctgaaaattatcaaggacaaggacttcctggacaatgaggaaaacgaggacattctggaagatatcgtgctgaccctgacactgtttgaggacagagagatgatcgaggaacggctgaaaacctatgcccacctgttcgacgacaaagtgatgaagcagctgaagcggcggagatacaccggctggggcaggctgagccggaagctgatcaacggcatccgggacaagcagtccggcaagacaatcctggatttcctgaagtccgacggcttcgccaacagaaacttcatgcagctgatccacgacgacagcctgacctttaaagaggacatccagaaagcccaggtgtccggccagggcgatagcctgcacgagcacattgccaatctggccggcagccccgccattaagaagggcatcctgcagacagtgaaggtggtggacgagctcgtgaaagtgatgggccggcacaagcccgagaacatcgtgatcgaaatggccagagagaaccagaccacccagaagggacagaagaacagccgcgagagaatgaagcggatcgaagagggcatcaaagagctgggcagccagatcctgaaagaacaccccgtggaaaacacccagctgcagaacgagaagctgtacctgtactacctgcagaatgggcgggatatgtacgtggaccaggaactggacatcaaccggctgtccgactacgatgtggacgccatcgtgcctcagagctttctgaaggacgactccatcgacaacaaggtgctgaccagaagcgacaagaaccggggcaagagcgacaacgtgccctccgaagaggtcgtgaagaagatgaagaactactggcggcagctgctgaacgccaagctgattacccagagaaagttcgacaatctgaccaaggccgagagaggcggcctgagcgaactggataaggccggcttcatcaagagacagctggtggaaacccggcagatcacaaagcacgtggcacagatcctggactcccggatgaacactaagtacgacgagaatgacaagctgatccgggaagtgaaagtgatcaccctgaagtccaagctggtgtccgatttccggaaggatttccagttttacaaagtgcgcgagatcaacaactaccaccacgcccacgacgcctacctgaacgccgtcgtgggaaccgccctgatcaaaaagtaccctaagctggaaagcgagttcgtgtacggcgactacaaggtgtacgacgtgcggaagatgatcgccaagagcgagcaggaaatcggcaaggctaccgccaagtacttcttctacagcaacatcatgaactttttcaagaccgagattaccctggccaacggcgagatccggaagcggcctctgatcgagacaaacggcgaaaccggggagatcgtgtgggataagggccgggattttgccaccgtgcggaaagtgctgagcatgccccaagtgaatatcgtgaaaaagaccgaggtgcagacaggcggcttcagcaaagagtctatcctgcccaagaggaacagcgataagctgatcgccagaaagaaggactgggaccctaagaagtacggcggcttcgacagccccaccgtggcctattctgtgctggtggtggccaaagtggaaaagggcaagtccaagaaactgaagagtgtgaaagagctgctggggatcaccatcatggaaagaagcagcttcgagaagaatcccatcgactttctggaagccaagggctacaaagaagtgaaaaaggacctgatcatcaagctgcctaagtactccctgttcgagctggaaaacggccggaagagaatgctggcctctgccggcgaactgcagaagggaaacgaactggccctgccctccaaatatgtgaacttcctgtacctggccagccactatgagaagctgaagggctcccccgaggataatgagcagaaacagctgtttgtggaacagcacaagcactacctggacgagatcatcgagcagatcagcgagttctccaagagagtgatcctggccgacgctaatctggacaaagtgctgtccgcctacaacaagcaccgggataagcccatcagagagcaggccgagaatatcatccacctgtttaccctgaccaatctgggagcccctgccgccttcaagtactttgacaccaccatcgaccggaagaggtacaccagcaccaaagaggtgctggacgccaccctgatccaccagagcatcaccggcctgtacgagacacggatcgacctgtctcagctgggaggcgacagccccaagaagaagagaaaggtgggagtcgacggatccagcggctccgagaccccaggcacatctgagagcgccacccctgagtccaccggtatgaacaattcacaggggagagtgacattcgaagacgtgaccgtgaacttcacccagggagaatggcagcgcttgaacccagaacaaaggaacctctatcgggacgtgatgctggaaaactactcaaatttggtgagcgttgggcagggtgagaccactaagcctgacgtgatcctgagattggaacagggcaaggagccttggctcgaggaagaggaagtcctgggctcagggagggccgagaaaaacggtgatataggaggccagatatggaagcctaaggacgtcaaggagagcctgagcgctgattacaaagatgatgacgataaagcccccaagaagaaaaggaaggtcccaaagaaaaaaagaaaggtgtga

SEQ ID NO: 1520 - protein, 2318 aa, Synthetic construct; identical to SEQ ID NO: 662

SEQ ID NO: 1521 - DNA, 6957 bp, Synthetic construct
  source 1..6957: mol_type = other DNA
atgggtaccatgccaaaaaagaagagaaaggtaccgaagaaaaaaagaaaggtatacaatcacgatcaggagttcgacccccctaaggtgtacccaccagtgcctgcagagaagaggaagccaatccgggtgctgagcctgtttgatggcatcgccaccggcctgctggtgctgaaggatctgggcatccaggtggaccggtacatcgcctccgaggtgtgcgaggattctatcaccgtgggcatggtgcgccaccagggcaagatcatgtatgtgggcgacgtgcggtccgtgacacagaagcacatccaggagtggggcccattcgatctggtgatcggcggcagcccctgtaatgacctgtccatcgtgaaccctgcaaggaagggactgtacgagggaaccggccggctgttctttgagttttatagactgctgcacgacgccaggcctaaggagggcgacgatagaccattcttttggctgttcgagaatgtggtggctatgggcgtgagcgataagagggacatctccaggtttctggagtctaaccccgtgatgatcgatgcaaaggaggtgtccgccgcacacagagccaggtatttctggggcaatctgccaggaatgaacaggccactggcaagcaccgtgaatgacaagctggagctgcaggagtgcctggagcacggaaggatcgccaagttttccaaggtgcgcacaatcaccacacggagcaattccatcaagcagggcaaggatcagcacttccccgtgttcatgaacgagaaggaggacatcctgtggtgtaccgagatggagagagtgttcggctttccagtgcactacacagacgtgtctaacatgagcaggctggcaaggcagcggctgctgggcagatcttggagcgtgcccgtgatcaggcacctgttcgcccctctgaaggagtattttgcctgcgtgagcagcggcaactccaatgccaacagccggggcccctctttcagctccggattggtgcctctgagcctgaggggctcccacatggcagcaatccccgccctggaccccgaggccgagcctagcatggacgtgatcctggtgggctctagcgagctgtcctctagcgtgtctccaggaaccggaagggatctgatcgcatacgaggtgaaggccaatcagcggaacatcgaggacatctgtatctgctgtggcagcctgcaggtgcacacacagcacccactgttcgagggaggaatctgcgcaccctgtaaggataagttcctggacgccctgtttctgtacgacgatgacggctaccagtcctattgctctatctgctgttccggcgagaccctgctgatctgcggcaatccagattgtacaaggtgctattgttttgagtgcgtggactctctggtgggaccaggcaccagcggaaaggtgcacgccatgtccaactgggtgtgctacctgtgcctgccatcctctcgcagcggactgctgcagcggagaaggaagtggagatcccagctgaaggccttctatgatagggagtctgagaaccccctggagatgtttgagaccgtgccagtgtggcgccggcagcccgtgagggtgctgagcctgttcgaggatatcaagaaggagctgacatccctgggctttctggagtccggctctgaccccggacagctgaagcacgtggtggatgtgaccgacacagtgcggaaggatgtggaggagtggggccctttcgacctggtgtacggagcaacccctccactgggacacacatgcgacagacccccttcttggtacctgttccagtttcaccgcctgctgcagtatgcaaggccaaagccaggcagccctagaccattcttttggatgttcgtggataatctggtgctgaacaaggaggatctggacgtggccagcaggtttctggagatggagccagtgaccatcccagacgtgcacggcggctccctgcagaatgccgtgcgcgtgtggtctaacatccctgccatcagaagcaggcactgggcactggtgagcgaggaggagctgtccctgctggcccagaataagcagagcagcaagctggccgccaagtggcctacaaagctggtgaagaactgcttcctgccactgcgggagtacttcaagtatttttccaccgagctgacatctagcctgggaggaccctcctctggcgccccaccacctagcggcggctcccctgccggctctccaaccagcacagaggagggcaccagcgagtccgccacaccagagtctggacctggcaccagcacagagccatccgagggctctgccccaggctctcctgcaggcagccctacctccaccgaagagggcaccagcacagagccttctgagggcagcgccccaggcacctctacagagccaagcgagctcgaggacaagaagtacagcatcggcctggccatcggcaccaactctgtgggctgggccgtgatcaccgacgagtacaaggtgcccagcaagaaattcaaggtgctgggcaacaccgaccggcacagcatcaagaagaacctgatcggagccctgctgttcgacagcggcgaaacagccgaggccacccggctgaagagaaccgccagaagaagatacaccagacggaagaaccggatctgctatctgcaagagatcttcagcaacgagatggccaaggtggacgacagcttcttccacagactggaagagtccttcctggtggaagaggataagaagcacgagcggcaccccatcttcggcaacatcgtggacgaggtggcctaccacgagaagtaccccaccatctaccacctgagaaagaaactggtggacagcaccgacaaggccgacctgcggctgatctatctggccctggcccacatgatcaagttccggggccacttcctgatcgagggcgacctgaaccccgacaacagcgacgtggacaagctgttcatccagctggtgcagacctacaaccagctgttcgaggaaaaccccatcaacgccagcggcgtggacgccaaggccatcctgtctgccagactgagcaagagcagacggctggaaaatctgatcgcccagctgcccggcgagaagaagaatggcctgttcggcaacctgattgccctgagcctgggcctgacccccaacttcaagagcaacttcgacctggccgaggatgccaaactgcagctgagcaaggacacctacgacgacgacctggacaacctgctggcccagatcggcgaccagtacgccgacctgtttctggccgccaagaacctgtccgacgccatcctgctgagcgacatcctgagagtgaacaccgagatcaccaaggcccccctgagcgcctctatgatcaagagatacgacgagcaccaccaggacctgaccctgctgaaagctctcgtgcggcagcagctgcctgagaagtacaaagagattttcttcgaccagagcaagaacggctacgccggctacattgacggcggagccagccaggaagagttctacaagttcatcaagcccatcctggaaaagatggacggcaccgaggaactgctcgtgaagctgaacagagaggacctgctgcggaagcagcggaccttcgacaacggcagcatcccccaccagatccacctgggagagctgcacgccattctgcggcggcaggaagatttttacccattcctgaaggacaaccgggaaaagatcgagaagatcctgaccttccgcatcccctactacgtgggccctctggccaggggaaacagcagattcgcctggatgaccagaaagagcgaggaaaccatcaccccctggaacttcgaggaagtggtggacaagggcgcttccgcccagagcttcatcgagcggatgaccaacttcgataagaacctgcccaacgagaaggtgctgcccaagcacagcctgctgtacgagtacttcaccgtgtataacgagctgaccaaagtgaaatacgtgaccgagggaatgagaaagcccgccttcctgagcggcgagcagaaaaaggccatcgtggacctgctgttcaagaccaaccggaaagtgaccgtgaagcagctgaaagaggactacttcaagaaaatcgagtgcttcgactccgtggaaatctccggcgtggaagatcggttcaacgcctccctgggcacataccacgatctgctgaaaattatcaaggacaaggacttcctggacaatgaggaaaacgaggacattctggaagatatcgtgctgaccctgacactgtttgaggacagagagatgatcgaggaacggctgaaaacctatgcccacctgttcgacgacaaagtgatgaagcagctgaagcggcggagatacaccggctggggcaggctgagccggaagctgatcaacggcatccgggacaagcagtccggcaagacaatcctggatttcctgaagtccgacggcttcgccaacagaaacttcatgcagctgatccacgacgacagcctgacctttaaagaggacatccagaaagcccaggtgtccggccagggcgatagcctgcacgagcacattgccaatctggccggcagccccgccattaagaagggcatcctgcagacagtgaaggtggtggacgagctcgtgaaagtgatgggccggcacaagcccgagaacatcgtgatcgaaatggccagagagaaccagaccacccagaagggacagaagaacagccgcgagagaatgaagcggatcgaagagggcatcaaagagctgggcagccagatcctgaaagaacaccccgtggaaaacacccagctgcagaacgagaagctgtacctgtactacctgcagaatgggcgggatatgtacgtggaccaggaactggacatcaaccggctgtccgactacgatgtggacgccatcgtgcctcagagctttctgaaggacgactccatcgacaacaaggtgctgaccagaagcgacaagaaccggggcaagagcgacaacgtgccctccgaagaggtcgtgaagaagatgaagaactactggcggcagctgctgaacgccaagctgattacccagagaaagttcgacaatctgaccaaggccgagagaggcggcctgagcgaactggataaggccggcttcatcaagagacagctggtggaaacccggcagatcacaaagcacgtggcacagatcctggactcccggatgaacactaagtacgacgagaatgacaagctgatccgggaagtgaaagtgatcaccctgaagtccaagctggtgtccgatttccggaaggatttccagttttacaaagtgcgcgagatcaacaactaccaccacgcccacgacgcctacctgaacgccgtcgtgggaaccgccctgatcaaaaagtaccctaagctggaaagcgagttcgtgtacggcgactacaaggtgtacgacgtgcggaagatgatcgccaagagcgagcaggaaatcggcaaggctaccgccaagtacttcttctacagcaacatcatgaactttttcaagaccgagattaccctggccaacggcgagatccggaagcggcctctgatcgagacaaacggcgaaaccggggagatcgtgtgggataagggccgggattttgccaccgtgcggaaagtgctgagcatgccccaagtgaatatcgtgaaaaagaccgaggtgcagacaggcggcttcagcaaagagtctatcctgcccaagaggaacagcgataagctgatcgccagaaagaaggactgggaccctaagaagtacggcggcttcgacagccccaccgtggcctattctgtgctggtggtggccaaagtggaaaagggcaagtccaagaaactgaagagtgtgaaagagctgctggggatcaccatcatggaaagaagcagcttcgagaagaatcccatcgactttctggaagccaagggctacaaagaagtgaaaaaggacctgatcatcaagctgcctaagtactccctgttcgagctggaaaacggccggaagagaatgctggcctctgccggcgaactgcagaagggaaacgaactggccctgccctccaaatatgtgaacttcctgtacctggccagccactatgagaagctgaagggctcccccgaggataatgagcagaaacagctgtttgtggaacagcacaagcactacctggacgagatcatcgagcagatcagcgagttctccaagagagtgatcctggccgacgctaatctggacaaagtgctgtccgcctacaacaagcaccgggataagcccatcagagagcaggccgagaatatcatccacctgtttaccctgaccaatctgggagcccctgccgccttcaagtactttgacaccaccatcgaccggaagaggtacaccagcaccaaagaggtgctggacgccaccctgatccaccagagcatcaccggcctgtacgagacacggatcgacctgtctcagctgggaggcgacagccccaagaagaagagaaaggtgggagtcgacggatccagcggctccgagaccccaggcacatctgagagcgccacccctgagtccaccggtgactccgttgctttcgaggacgtggccgtgaacttcacacttgaggaatgggccttgctcgacccaagtcagaagaatctgtacagagacgtgatgcgggagacattcaggaatctcgccagtgtcggaaagcagtgggaagaccagaacatcgaagatcctttcaagataccacggcgcaatatctcccacattcctgagaggctgtgtgaatctaaggaaggcggacaaggtgaggaaagcgctgattacaaagatgatgacgataaagcccccaagaagaaaaggaaggtcccaaagaaaaaaagaaaggtgtga

SEQ ID NO: 1522 - protein, 2275 aa, Synthetic construct
MYPYDVPDYASPKKKRKVNHDQEFDPPKVYPPVPAEKRKPIRVLSLFDGIATGLLVLKDLGIQVDRYIASEVCEDSITVGMVRHQGKIMYVGDVRSVTQKHIQEWGPFDLVIGGSPCNDLSIVNPARKGLYEGTGRLFFEFYRLLHDARPKEGDDRPFFWLFENVVAMGVSDKRDISRFLESNPVMIDAKEVSAAHRARYFWGNLPGMNRPLASTVNDKLELQECLEHGRIAKFSKVRTITTRSNSIKQGKDQHFPVFMNEKEDILWCTEMERVFGFPVHYTDVSNMSRLARQRLLGRSWSVPVIRHLFAPLKEYFACVSSGNSNANSRGPSFSSGLVPLSLRGSHMAAIPALDPEAEPSMDVILVGSSELSSSVSPGTGRDLIAYEVKANQRNIEDICICCGSLQVHTQHPLFEGGICAPCKDKFLDALFLYDDDGYQSYCSICCSGETLLICGNPDCTRCYCFECVDSLVGPGTSGKVHAMSNWVCYLCLPSSRSGLLQRRRKWRSQLKAFYDRESENPLEMFETVPVWRRQPVRVLSLFEDIKKELTSLGFLESGSDPGQLKHVVDVTDTVRKDVEEWGPFDLVYGATPPLGHTCDRPPSWYLFQFHRLLQYARPKPGSPRPFFWMFVDNLVLNKEDLDVASRFLEMEPVTIPDVHGGSLQNAVRVWSNIPAIRSRHWALVSEEELSLLAQNKQSSKLAAKWPTKLVKNCFLPLREYFKYFSTELTSSLGGPSSGAPPPSGGSPAGSPTSTEEGTSESATPESGPGTSTEPSEGSAPGSPAGSPTSTEEGTSTEPSEGSAPGTSTEPSELEDKKYSIGLAIGTNSVGWAVITDEYKVPSKKFKVLGNTDRHSIKKNLIGALLFDSGETAEATRLKRTARRRYTRRKNRICYLQEIFSNEMAKVDDSFFHRLEESFLVEEDKKHERHPIFGNIVDEVAYHEKYPTIYHLRKKLVDSTDKADLRLIYLALAHMIKFRGHFLIEGDLNPDNSDVDKLFIQLVQTYNQLFEENPINASGVDAKAILSARLSKSRRLENLIAQLPGEKKNGLFGNLIALSLGLTPNFKSNFDLAEDAKLQLSKDTYDDDLDNLLAQIGDQYADLFLAAKNLSDAILLSDILRVNTEITKAPLSASMIKRYDEHHQDLTLLKALVRQQLPEKYKEIFFDQSKNGYAGYIDGGASQEEFYKFIKPILEKMDGTEELLVKLNREDLLRKQRTFDNGSIPHQIHLGELHAILRRQEDFYPFLKDNREKIEKILTFRIPYYVGPLARGNSRFAWMTRKSEETITPWNFEEVVDKGASAQSFIERMTNFDKNLPNEKVLPKHSLLYEYFTVYNELTKVKYVTEGMRKPAFLSGEQKKAIVDLLFKTNRKVTVKQLKEDYFKKIECFDSVEISGVEDRFNASLGTYHDLLKIIKDKDFLDNEENEDILEDIVLTLTLFEDREMIEERLKTYAHLFDDKVMKQLKRRRYTGWGRLSRKLINGIRDKQSGKTILDFLKSDGFANRNFMQLIHDDSLTFKEDIQKAQVSGQGDSLHEHIANLAGSPAIKKGILQTVKVVDELVKVMGRHKPENIVIEMARENQTTQKGQKNSRERMKRIEEGIKELGSQILKEHPVENTQLQNEKLYLYYLQNGRDMYVDQELDINRLSDYDVDAIVPQSFLKDDSIDNKVLTRSDKNRGKSDNVPSEEVVKKMKNYWRQLLNAKLITQRKFDNLTKAERGGLSELDKAGFIKRQLVETRQITKHVAQILDSRMNTKYDENDKLIREVKVITLKSKLVSDFRKDFQFYKVREINNYHHAHDAYLNAVVGTALIKKYPKLESEFVYGDYKVYDVRKMIAKSEQEIGKATAKYFFYSNIMNFFKTEITLANGEIRKRPLIETNGETGEIVWDKGRDFATVRKVLSMPQVNIVKKTEVQTGGFSKESILPKRNSDKLIARKKDWDPKKYGGFDSPTVAYSVLVVAKVEKGKSKKLKSVKELLGITIMERSSFEKNPIDFLEAKGYKEVKKDLIIKLPKYSLFELENGRKRMLASAGELQKGNELALPSKYVNFLYLASHYEKLKGSPEDNEQKQLFVEQHKHYLDEIIEQISEFSKRVILADANLDKVLSAYNKHRDKPIREQAENIIHLFTLTNLGAPAAFKYFDTTIDRKRYTSTKEVLDATLIHQSITGLYETRIDLSQLGGDSPKKKRKVGVDGSSGSETPGTSESATPESRTLVTFKDVFVDFTREEWKLLDTAQQIVYRNVMLENYKNLVSLGYQLTKPDVILRLEKGEEPWLV

SEQ ID NO: 1523 - protein, 80 aa, synthetic construct; identical to SEQ ID NO: 395

SEQ ID NO: 1524 - protein, 80 aa, synthetic construct; identical to SEQ ID NO: 559

SEQ ID NO: 1525 - protein, 2295 aa, synthetic construct
MPKKKRKVPKKKRKVYNHDQEFDPPKVYPPVPAEKRKPIRVLSLFDGIATGLLVLKDLGIQVDRYIASEVCEDSITVGMVRHQGKIMYVGDVRSVTQKHIQEWGPFDLVIGGSPCNDLSIVNPARKGLYEGTGRLFFEFYRLLHDARPKEGDDRPFFWLFENVVAMGVSDKRDISRFLESNPVMIDAKEVSAAHRARYFWGNLPGMNRPLASTVNDKLELQECLEHGRIAKFSKVRTITTRSNSIKQGKDQHFPVFMNEKEDILWCTEMERVFGFPVHYTDVSNMSRLARQRLLGRSWSVPVIRHLFAPLKEYFACVSSGNSNANSRGPSFSSGLVPLSLRGSHMAAIPALDPEAEPSMDVILVGSSELSSSVSPGTGRDLIAYEVKANQRNIEDICICCGSLQVHTQHPLFEGGICAPCKDKFLDALFLYDDDGYQSYCSICCSGETLLICGNPDCTRCYCFECVDSLVGPGTSGKVHAMSNWVCYLCLPSSRSGLLQRRRKWRSQLKAFYDRESENPLEMFETVPVWRRQPVRVLSLFEDIKKELTSLGFLESGSDPGQLKHVVDVTDTVRKDVEEWGPFDLVYGATPPLGHTCDRPPSWYLFQFHRLLQYARPKPGSPRPFFWMFVDNLVLNKEDLDVASRFLEMEPVTIPDVHGGSLQNAVRVWSNIPAIRSRHWALVSEEELSLLAQNKQSSKLAAKWPTKLVKNCFLPLREYFKYFSTELTSSPGGPSSGAPPPSGGSPAGSPTSTEEGTSESATPESGPGTSTEPSEGSAPGSPAGSPTSTEEGTSTEPSEGSAPGTSTEPSELEDKKYSIGLAIGTNSVGWAVITDEYKVPSKKFKVLGNTDRHSIKKNLIGALLFDSGETAEATRLKRTARRRYTRRKNRICYLQEIFSNEMAKVDDSFFHRLEESFLVEEDKKHERHPIFGNIVDEVAYHEKYPTIYHLRKKLVDSTDKADLRLIYLALAHMIKFRGHFLIEGDLNPDNSDVDKLFIQLVQTYNQLFEENPINASGVDAKAILSARLSKSRRLENLIAQLPGEKKNGLFGNLIALSLGLTPNFKSNFDLAEDAKLQLSKDTYDDDLDNLLAQIGDQYADLFLAAKNLSDAILLSDILRVNTEITKAPLSASMIKRYDEHHQDLTLLKALVRQQLPEKYKEIFFDQSKNGYAGYIDGGASQEEFYKFIKPILEKMDGTEELLVKLNREDLLRKQRTFDNGSIPHQIHLGELHAILRRQEDFYPFLKDNREKIEKILTFRIPYYVGPLARGNSRFAWMTRKSEETITPWNFEEVVDKGASAQSFIERMTNFDKNLPNEKVLPKHSLLYEYFTVYNELTKVKYVTEGMRKPAFLSGEQKKAIVDLLFKTNRKVTVKQLKEDYFKKIECFDSVEISGVEDRFNASLGTYHDLLKIIKDKDFLDNEENEDILEDIVLTLTLFEDREMIEERLKTYAHLFDDKVMKQLKRRRYTGWGRLSRKLINGIRDKQSGKTILDFLKSDGFANRNFMQLIHDDSLTFKEDIQKAQVSGQGDSLHEHIANLAGSPAIKKGILQTVKVVDELVKVMGRHKPENIVIEMARENQTTQKGQKNSRERMKRIEEGIKELGSQILKEHPVENTQLQNEKLYLYYLQNGRDMYVDQELDINRLSDYDVDAIVPQSFLKDDSIDNKVLTRSDKNRGKSDNVPSEEVVKKMKNYWRQLLNAKLITQRKFDNLTKAERGGLSELDKAGFIKRQLVETRQITKHVAQILDSRMNTKYDENDKLIREVKVITLKSKLVSDFRKDFQFYKVREINNYHHAHDAYLNAVVGTALIKKYPKLESEFVYGDYKVYDVRKMIAKSEQEIGKATAKYFFYSNIMNFFKTEITLANGEIRKRPLIETNGETGEIVWDKGRDFATVRKVLSMPQVNIVKKTEVQTGGFSKESILPKRNSDKLIARKKDWDPKKYGGFDSPTVAYSVLVVAKVEKGKSKKLKSVKELLGITIMERSSFEKNPIDFLEAKGYKEVKKDLIIKLPKYSLFELENGRKRMLASAGELQKGNELALPSKYVNFLYLASHYEKLKGSPEDNEQKQLFVEQHKHYLDEIIEQISEFSKRVILADANLDKVLSAYNKHRDKPIREQAENIIHLFTLTNLGAPAAFKYFDTTIDRKRYTSTKEVLDATLIHQSITGLYETRIDLSQLGGDSPKKKRKVGVDGSSGSETPGTSESATPESRTLVTFKDVFVDFTREEWKLLDTAQQIVYRNVMLENYKNLVSLGYQLTKPDVILRLEKGEEPSADYKDDDDKAPKKKRKVPKKKRKV

SEQ ID NO: 1526 - DNA, 6897 bp, synthetic construct
  source 1..6897: mol_type = other DNA
atgggtaccatgccaaaaaagaagagaaaggtaccgaagaaaaaaagaaaggtatacaatcacgatcaggagttcgacccccctaaggtgtacccaccagtgcctgcagagaagaggaagccaatccgggtgctgagcctgtttgatggcatcgccaccggcctgctggtgctgaaggatctgggcatccaggtggaccggtacatcgcctccgaggtgtgcgaggattctatcaccgtgggcatggtgcgccaccagggcaagatcatgtatgtgggcgacgtgcggtccgtgacacagaagcacatccaggagtggggcccattcgatctggtgatcggcggcagcccctgtaatgacctgtccatcgtgaaccctgcaaggaagggactgtacgagggaaccggccggctgttctttgagttttatagactgctgcacgacgccaggcctaaggagggcgacgatagaccattcttttggctgttcgagaatgtggtggctatgggcgtgagcgataagagggacatctccaggtttctggagtctaaccccgtgatgatcgatgcaaaggaggtgtccgccgcacacagagccaggtatttctggggcaatctgccaggaatgaacaggccactggcaagcaccgtgaatgacaagctggagctgcaggagtgcctggagcacggaaggatcgccaagttttccaaggtgcgcacaatcaccacacggagcaattccatcaagcagggcaaggatcagcacttccccgtgttcatgaacgagaaggaggacatcctgtggtgtaccgagatggagagagtgttcggctttccagtgcactacacagacgtgtctaacatgagcaggctggcaaggcagcggctgctgggcagatcttggagcgtgcccgtgatcaggcacctgttcgcccctctgaaggagtattttgcctgcgtgagcagcggcaactccaatgccaacagccggggcccctctttcagctccggattggtgcctctgagcctgaggggctcccacatggcagcaatccccgccctggaccccgaggccgagcctagcatggacgtgatcctggtgggctctagcgagctgtcctctagcgtgtctccaggaaccggaagggatctgatcgcatacgaggtgaaggccaatcagcggaacatcgaggacatctgtatctgctgtggcagcctgcaggtgcacacacagcacccactgttcgagggaggaatctgcgcaccctgtaaggataagttcctggacgccctgtttctgtacgacgatgacggctaccagtcctattgctctatctgctgttccggcgagaccctgctgatctgcggcaatccagattgtacaaggtgctattgttttgagtgcgtggactctctggtgggaccaggcaccagcggaaaggtgcacgccatgtccaactgggtgtgctacctgtgcctgccatcctctcgcagcggactgctgcagcggagaaggaagtggagatcccagctgaaggccttctatgatagggagtctgagaaccccctggagatgtttgagaccgtgccagtgtggcgccggcagcccgtgagggtgctgagcctgttcgaggatatcaagaaggagctgacatccctgggctttctggagtccggctctgaccccggacagctgaagcacgtggtggatgtgaccgacacagtgcggaaggatgtggaggagtggggccctttcgacctggtgtacggagcaacccctccactgggacacacatgcgacagacccccttcttggtacctgttccagtttcaccgcctgctgcagtatgcaaggccaaagccaggcagccctagaccattcttttggatgttcgtggataatctggtgctgaacaaggaggatctggacgtggccagcaggtttctggagatggagccagtgaccatcccagacgtgcacggcggctccctgcagaatgccgtgcgcgtgtggtctaacatccctgccatcagaagcaggcactgggcactggtgagcgaggaggagctgtccctgctggcccagaataagcagagcagcaagctggccgccaagtggcctacaaagctggtgaagaactgcttcctgccactgcgggagtacttcaagtatttttccaccgagctgacatctagccccggaggaccctcctctggcgccccaccacctagcggcggctcccctgccggctctccaaccagcacagaggagggcaccagcgagtccgccacaccagagtctggacctggcaccagcacagagccatccgagggctctgccccaggctctcctgcaggcagccctacctccaccgaagagggcaccagcacagagccttctgagggcagcgccccaggcacctctacagagccaagcgagctcgaggacaagaagtacagcatcggcctggccatcggcaccaactctgtgggctgggccgtgatcaccgacgagtacaaggtgcccagcaagaaattcaaggtgctgggcaacaccgaccggcacagcatcaagaagaacctgatcggagccctgctgttcgacagcggcgaaacagccgaggccacccggctgaagagaaccgccagaagaagatacaccagacggaagaaccggatctgctatctgcaagagatcttcagcaacgagatggccaaggtggacgacagcttcttccacagactggaagagtccttcctggtggaagaggataagaagcacgagcggcaccccatcttcggcaacatcgtggacgaggtggcctaccacgagaagtaccccaccatctaccacctgagaaagaaactggtggacagcaccgacaaggccgacctgcggctgatctatctggccctggcccacatgatcaagttccggggccacttcctgatcgagggcgacctgaaccccgacaacagcgacgtggacaagctgttcatccagctggtgcagacctacaaccagctgttcgaggaaaaccccatcaacgccagcggcgtggacgccaaggccatcctgtctgccagactgagcaagagcagacggctggaaaatctgatcgcccagctgcccggcgagaagaagaatggcctgttcggcaacctgattgccctgagcctgggcctgacccccaacttcaagagcaacttcgacctggccgaggatgccaaactgcagctgagcaaggacacctacgacgacgacctggacaacctgctggcccagatcggcgaccagtacgccgacctgtttctggccgccaagaacctgtccgacgccatcctgctgagcgacatcctgagagtgaacaccgagatcaccaaggcccccctgagcgcctctatgatcaagagatacgacgagcaccaccaggacctgaccctgctgaaagctctcgtgcggcagcagctgcctgagaagtacaaagagattttcttcgaccagagcaagaacggctacgccggctacattgacggcggagccagccaggaagagttctacaagttcatcaagcccatcctggaaaagatggacggcaccgaggaactgctcgtgaagctgaacagagaggacctgctgcggaagcagcggaccttcgacaacggcagcatcccccaccagatccacctgggagagctgcacgccattctgcggcggcaggaagatttttacccattcctgaaggacaaccgggaaaagatcgagaagatcctgaccttccgcatcccctactacgtgggccctctggccaggggaaacagcagattcgcctggatgaccagaaagagcgaggaaaccatcaccccctggaacttcgaggaagtggtggacaagggcgcttccgcccagagcttcatcgagcggatgaccaacttcgataagaacctgcccaacgagaaggtgctgcccaagcacagcctgctgtacgagtacttcaccgtgtataacgagctgaccaaagtgaaatacgtgaccgagggaatgagaaagcccgccttcctgagcggcgagcagaaaaaggccatcgtggacctgctgttcaagaccaaccggaaagtgaccgtgaagcagctgaaagaggactacttcaagaaaatcgagtgcttcgactccgtggaaatctccggcgtggaagatcggttcaacgcctccctgggcacataccacgatctgctgaaaattatcaaggacaaggacttcctggacaatgaggaaaacgaggacattctggaagatatcgtgctgaccctgacactgtttgaggacagagagatgatcgaggaacggctgaaaacctatgcccacctgttcgacgacaaagtgatgaagcagctgaagcggcggagatacaccggctggggcaggctgagccggaagctgatcaacggcatccgggacaagcagtccggcaagacaatcctggatttcctgaagtccgacggcttcgccaacagaaacttcatgcagctgatccacgacgacagcctgacctttaaagaggacatccagaaagcccaggtgtccggccagggcgatagcctgcacgagcacattgccaatctggccggcagccccgccattaagaagggcatcctgcagacagtgaaggtggtggacgagctcgtgaaagtgatgggccggcacaagcccgagaacatcgtgatcgaaatggccagagagaaccagaccacccagaagggacagaagaacagccgcgagagaatgaagcggatcgaagagggcatcaaagagctgggcagccagatcctgaaagaacaccccgtggaaaacacccagctgcagaacgagaagctgtacctgtactacctgcagaatgggcgggatatgtacgtggaccaggaactggacatcaaccggctgtccgactacgatgtggacgccatcgtgcctcagagctttctgaaggacgactccatcgacaacaaggtgctgaccagaagcgacaagaaccggggcaagagcgacaacgtgccctccgaagaggtcgtgaagaagatgaagaactactggcggcagctgctgaacgccaagctgattacccagagaaagttcgacaatctgaccaaggccgagagaggcggcctgagcgaactggataaggccggcttcatcaagagacagctggtggaaacccggcagatcacaaagcacgtggcacagatcctggactcccggatgaacactaagtacgacgagaatgacaagctgatccgggaagtgaaagtgatcaccctgaagtccaagctggtgtccgatttccggaaggatttccagttttacaaagtgcgcgagatcaacaactaccaccacgcccacgacgcctacctgaacgccgtcgtgggaaccgccctgatcaaaaagtaccctaagctggaaagcgagttcgtgtacggcgactacaaggtgtacgacgtgcggaagatgatcgccaagagcgagcaggaaatcggcaaggctaccgccaagtacttcttctacagcaacatcatgaactttttcaagaccgagattaccctggccaacggcgagatccggaagcggcctctgatcgagacaaacggcgaaaccggggagatcgtgtgggataagggccgggattttgccaccgtgcggaaagtgctgagcatgccccaagtgaatatcgtgaaaaagaccgaggtgcagacaggcggcttcagcaaagagtctatcctgcccaagaggaacagcgataagctgatcgccagaaagaaggactgggaccctaagaagtacggcggcttcgacagccccaccgtggcctattctgtgctggtggtggccaaagtggaaaagggcaagtccaagaaactgaagagtgtgaaagagctgctggggatcaccatcatggaaagaagcagcttcgagaagaatcccatcgactttctggaagccaagggctacaaagaagtgaaaaaggacctgatcatcaagctgcctaagtactccctgttcgagctggaaaacggccggaagagaatgctggcctctgccggcgaactgcagaagggaaacgaactggccctgccctccaaatatgtgaacttcctgtacctggccagccactatgagaagctgaagggctcccccgaggataatgagcagaaacagctgtttgtggaacagcacaagcactacctggacgagatcatcgagcagatcagcgagttctccaagagagtgatcctggccgacgctaatctggacaaagtgctgtccgcctacaacaagcaccgggataagcccatcagagagcaggccgagaatatcatccacctgtttaccctgaccaatctgggagcccctgccgccttcaagtactttgacaccaccatcgaccggaagaggtacaccagcaccaaagaggtgctggacgccaccctgatccaccagagcatcaccggcctgtacgagacacggatcgacctgtctcagctgggaggcgacagccccaagaagaagagaaaggtgggagtcgacggatccagcggctccgagaccccaggcacatctgagagcgccacccctgagtcccggaccctggtgaccttcaaggatgtatttgtggacttcaccagggaggagtggaagctgctggacactgctcagcagatcgtgtacagaaatgtgatgctggagaactataagaacctggtttccttgggttatcagcttactaagccagatgtgatcctccggttggagaagggagaagagcccagcgctgattacaaagatgatgacgataaagccccaaaaaagaagagaaaggtaccgaagaaaaaaagaaaggtctga

SEQ ID NO: 1527 - protein, 1116 aa, synthetic construct
MGTMPKKKRKVPKKKRKVYNHDQEFDPPKVYPPVPAEKRKPIRVLSLFDGIATGLLVLKDLGIQVDRYIASEVCEDSITVGMVRHQGKIMYVGDVRSVTQKHIQEWGPFDLVIGGSPCNDLSIVNPARKGLYEGTGRLFFEFYRLLHDARPKEGDDRPFFWLFENVVAMGVSDKRDISRFLESNPVMIDAKEVSAAHRARYFWGNLPGMNRPLASTVNDKLELQECLEHGRIAKFSKVRTITTRSNSIKQGKDQHFPVFMNEKEDILWCTEMERVFGFPVHYTDVSNMSRLARQRLLGRSWSVPVIRHLFAPLKEYFACVSSGNSNANSRGPSFSSGLVPLSLRGSHMAAIPALDPEAEPSMDVILVGSSELSSSVSPGTGRDLIAYEVKANQRNIEDICICCGSLQVHTQHPLFEGGICAPCKDKFLDALFLYDDDGYQSYCSICCSGETLLICGNPDCTRCYCFECVDSLVGPGTSGKVHAMSNWVCYLCLPSSRSGLLQRRRKWRSQLKAFYDRESENPLEMFETVPVWRRQPVRVLSLFEDIKKELTSLGFLESGSDPGQLKHVVDVTDTVRKDVEEWGPFDLVYGATPPLGHTCDRPPSWYLFQFHRLLQYARPKPGSPRPFFWMFVDNLVLNKEDLDVASRFLEMEPVTIPDVHGGSLQNAVRVWSNIPAIRSRHWALVSEEELSLLAQNKQSSKLAAKWPTKLVKNCFLPLREYFKYFSTELTSSLGGPSSGAPPPSGGSPAGSPTSTEEGTSESATPESGPGTSTEPSEGSAPGSPAGSPTSTEEGTSTEPSEGSAPGTSTEPSELSRPGERPFQCRICMRNFSTPSKLDRHTRTHTGEKPFQCRICMRNFSLAENLRRHLRTHTGSQKPFQCRICMRNFSRQDNLGRHLRTHTGEKPFQCRICMRNFSDGGNLGRHLKTHTGGGGSQKPFQCRICMRNFSQSPHLKRHLRTHTGEKPFQCRICMRNFSQSTSLQRHLKTHLRGSSGSETPGTSESATPESTGDSVAFEDVAVNFTLEEWALLDPSQKNLYRDVMRETFRNLASVGKQWEDQNIEDPFKIPRRNISHIPERLCESKEGGQGEESADYKDDDDKAPKKKRKVPKKKRKV